United States Patent Application Publication US 2007/0042361 A1 - sequence listing, part 2

SEQ ID NO: 1187 - DNA, 5775 bp, Homo sapiens
cgggtccgtagtgggctaagggggagggtttcaaagggagcgcacttccgctgccctttctttcgccagccttacgggcccgaaccctcgtgtgaagggtgcagtacctaagccggagcggggtagaggcgggccggcacccccttctgacctccagtgccgccggcctcaagatcagacatggcccagaacttgaaggacttggcgggacggctgcccgccgggccccggggcatgggcacggccctgaagctgttgctgggggccggcgccgtggcctacggtgtgcgcgaatctgtgttcaccggtgagcaacctccgcctgctcgccggacgcttccagtccctcccccaaaccccttgccctgtccccgcgcccctccacgggcctagcatttcctctgagcagcggcctggcctgatcaccacccatctccccacagtggaaggcgggcacagagccatcttcttcaatcggatcggtggagtgcagcaggacactatcctggccgagggccttcacttcaggtaatggcgggcagagcctgctgaccctgacctttcacccttgacgccgacccagcagtggctatagtcggacgtgcaacaggattcaacgctgctcttttcccaccctcctcatccctgcccctaggatagtgggtgctgcgagaacctccagcagcatacaaactgttgttttccagagggacaagagaatctctccttgtctgtggtcgtggagaggagcaggccaaaaaacgcgtggtgaggggaaaccgggcaaggctagtgaaactgcggccttttctttttttttttttggagagggagtcttgctctgtcgcccaggctggagtgcagtggcgcgatctcggctcactgcaacctccgcctcctgatttcaagcgattctcctgcctcagcctcacgagtagctgggattacaggcgcccgccaccacgcccggctaatttttgtattttagtagagacggggtttcactatgtagatcaagctggtctcgaactcctgacctcaaatgatccgcccgcctcggcctcccaaagtgctgggattacaggcgtgagccaccgcgcccggccgaaactgtggcctcttaatacctatccctgtcctctccaggatcccttggttccagtaccccattatctatgacattcgggccagacctcgaaaaatctcctcccctacaggctccaaaggtaggtctgagcacttggtaatcacatggcaggtgggatgatcaaggtagctggcaagaaaccccaggggaatatggtagtgtcaggcctttaggcctctttccacatctgcaagagctgtaacaaaaatacctgcctcctggggtcaaagcagcaaattctgaacacactgtgtttgcgtgctttttactgtctcctccctgacgtgtattcaataagagtattgtttgtccctcgtcttgttcactgcctagatcaaagctttgttttaaagccttttttttctaactgcttgacttactatatctacagttacatccactagtacactctgttctggagaagtttgtccctaagcttgactagttcacctgttctctccttctagaccatacataaaagccgtgcctttgagttccccagacctcttcctcctccccacccacgcacacatatacaccctgggtcaggtagctcacctgtaacctgtaatgtacttctttgtgctatacctagtgcaggtcgcttattcatttactagactgggccctgggaataaaagattcattaaacacaattcttgtcccccaagtccttacaggagacatgattacggtacagcacgaaagcgcccacgttagaggttgcacagagtacagagggggaaagagtagtcagctctgctggtgacggggtttgcagttcaaggcttcacagtgggtgagggtgcatttcagctgtgctgcgtcttgtcttccttgtcagcctgattaactctcctccccccagggtagtgccaggctgtacaccattgcacagggcatacagggaggaacatgaaggagaaaatgcttgggaaagggtgtttggccttgaccagccactgctgacctcaatctcagacctacagatggtgaatatctccctgcgagtgttgtctcgacccaatgctcaggagcttcctagcatgtaccagcgcctagggctggactacgaggaacgagtgttgccgtccattgtcaacgaggtgctcaagagtgtggtggccaagttcaatgcctcacagctgatcacccagcgggcccaggtctgactcccaccaccatctgcgtggtgtcagcctttccttcctaggcccagagtattgggaattaggaaaggcagcttattagaaaagcattgtcaccctagtgccatttccacctaaaagctgtgctaattgccactgtgaaataaggagagccagcattagaactcgatagcactcggtgttaggaagcacagaggaaaatggccaagtcttggcttttcctgcacctcttcgagcagagaggcttatgttacaggtttgcctgacaggaagctaaggcagtgcatgttgtattgagagtgaagggttaggggtcgcaaccttcctttcagctccccagtcccctcaaaccacccctcccttcccctcttcacccctgccctcaggtatccctgttgatccgccgggagctgacagagagggccaaggacttcagcctcatcctggatgatgtggccatcacagagctgagctttagccgagagtacacagctgctgtagaagccaaacaagtgggtgagtcgcaagagccgtggggtgagggcttctgagatgcaggaggaggaaagactccatgggtggggctcctgacccaggacagggtctccctgactctctcccaccacagcccagcaggaggcccagcgggcccaattcttggtagaaaaagcaaagcaggaacagcggcagaaaattgtgcaggccgagggtgaggccgaggctgccaagatgatatccttctgctggagagatctcagcccagcccctagggcacctgagttccccattctccttcatgggcaggctgatgagactaaggcgaatgcgactccgtgctctctggcccttggctccttgttgggggtggggactacagatgagatctgaaatcttagtggtagtacctgagccatgactccccactgtaaggccagatcaatagcattggtggccttgccttcatttctggtgctgcccctagttcctggcagcagcctgcagggaggcccacaggtggggtccacggtagggctgggcacaagccacctgagcgcaaccttggatctgacagcccagaggaggactggagcaagggagtgtggtaaggacagggccagggattgagacctgcccttgcgtgtaccttaaccctcctcaccttggagaagcactgagcaagaaccctggctacatcaaacttcgcaagattcgagcagcccagaatatctccaagacggtgagtgtgtcagcccagcgtctctgatggggctgccttgagaaagtgctttcagttaaggcacattgaggtgagggaattcgaaccttgcttgttccggtttctactcagattggcttctctggccggcgcggtggctcacgcatgtaatccccgcactttgggaggccaaggtgggtggatcacctgaggtcaggagttcgagaccagcctggccaacatggtgaaaccccatctctactaaaaatacaaaagataatgagcccgctgtggtggcgtttagctatattcccagctacgcaggaggctgaggcaggagaatcacttgaacccaggaggcggaagttgcagtgagctgagatcatgccactgcactccagcctgagcaacagagcaagactccgtctcaaaaataaataaataaaaaattggcttctccgatactcctcctgtcaagaatgattcctctgggttccctgaccttttgttctaatcatagctgctgctcagcgctctggatccctaagtgcgagcagaaaccatgtgttactcattgctgcacccctgccctaatctgcatgtgttccatgttaagtagctgctgaattgcaggggtcggaattgaggtctttgcttaatgcaagcatctgtcttatttcctgccctgtagatcgccacatcacagaatcgtatctatctcacagctgacaaccttgtgctgaacctacaggatgaaagtttcaccaggtgagagatgtggccacactgtggggtatcaccaagaacgtgggacctgagtctggttgtttgggctctggagcctgctacagctattcatatggctcagagacattgaaccaaaattagaaaagggggtggttgacagtttctatcttgcatctcataggattgattttatgagatcaaataggattattcacataaaaagcactttaattataaagttttcatctaaccaaaaagtgatgaaagatgatactcagttttcttactcaagagccctcaaactcctctggtgaatggagggatgttaggaaaggagatgagaaatagcagtggccatgagaacatgcctcctcctttcatgagcctgagattcctggctgtcaaccctgtttatcttttctcttgggagcaaaggagggttcaaagctgagtggggcctgaagctgtcaattaacatgtgcatttctcttctctgtttcttgttcatctggcgatctggcaccacaggggaaggtaagctgttgttgcttctgtggggtcctgcaggccaccttctccagtacccgcctcctaccctaccccctttcccacctccccgaagacaaaccctcaatcagggtaggagggtcgtagagggaatggcctagagtgtcctgcctctcacatttatgtcccctaataatgtcattatctatcttttttttcctacagtgacagcctcatcaagggtaagaaatgagcctagtcaccaagaactccacccccagaggaagtggatctgcttctccagtttttgaggagccagccaggggtccagcacagccctaccccgccccagtatcatgcgatggtcccccacaccggttccctgaacccctcttggattaaggaagactgaagactagccccttttctggggaattactttcctcctccctgtgttaactggggctgttggggacagtgcgtgatttctcagtgatttcctacagtgttgttccctccctcaaggctgggaggagataaacaccaacccaggaattctcaataaatttttattacttaacctgaagtcaaggcttcacgtgttcatgaactgggtaactggcagcaagcatgcgcacgttcacatgtgcgctcctgggtctgtctttgtgtgtgccagcagggggcgcaaaagaatctggctggggcggctaaggggaagcaaggcctgggctccgaaacaggacccaagctgggaaggctggccctgagttctcgaggcccagctgtgctcttcacacaccctccatttctcccacatcacccatttttttaaggctggacagccatggctttgctgagccagattaaaaatctgatgaccccaacaggagctgcttccttggcagcagggttccttgtggctgtggggagcctgcctgtgcctgttgaggcacttctgtgcccagaagcccagtggatcgcgtggc

SEQ ID NO: 1188 - DNA, 738 bp, Homo sapiens
ctggagcccggggtcctccgctcaactcaggacgttgaggctgcattgagccaagatcatacctctacactccagcatgggcaaaagagcaagattctgtctcaaaaataaataaataaattttgtttttaattagccaggcatgatggcatgcacctgtagtcccagctattcaggagaccaaggtgggaggatcatttgagcccaggaatttgagactgcagtgaactatgatgatgccactgcattccaacctagatgacagaaggagacctcatctctaaaaataaatatatatattttttccaaccactttttatctataccccaatgtcttacattccataaaacatcatgttttgaattccagtataactttatcgttaaacatgtttctttgcagaagcatgtataagttagggtccacaagattatttgcataagctaatttacaaaaaaaattatataatcactgacatgaaagcatgtctgggcagccatgggagctcatatgaggcgtccagttcagtcgccttttaaaaatgatatttgcattagctgggcatggtagcatgtgtctgtagtcccagctactcaggggactgaagtgagaggatgcaccagagccccagaagtcaaggctgcagtgagccatgatcacatcactgcaccagcctgggcaacaggagtgaggccttgtctcagtcagtcaatcaatcaatcaataatggtatttgg

SEQ ID NO: 1189 - DNA, 541 bp, Homo sapiens
ttttttcaagttttattttaagttcaggggtccatatgtgataaagtttatttttcaacttctattttaagtttaggggtccatgtgcagactatgcaggtctcttacatacataaatgcgtaccactgtggtttactgcacagatcatctcatcacccaggtaccaagcccagcatccgcagctattcttcctgatgctctccttcccctcccccatgccatgaaacaggtgtccagtgtgtgttgttcttcctgatgtgtccatgtgttctcattgatctgcttctgctaataagttagaataataataggcggtgtttggttttctgttcctgcattagtttgctgggagtaatggcttcaaattccaaccatgtccctgcaagggacatcatctcattatattttatggcttcatagtgttccatggtgtatgtgtaccacatttcctttatccagtgtatcattgatgggcatgtagattgattacatgatgttgctattgtaaatagtgctgcaatgagcatttgtatacatgta

SEQ ID NO: 1190 - DNA, 105 bp, Homo sapiens
ggaggctaaggcaggagaatcacttgaacctgggtggcagatgttgcagtgagccgagatacttccactgcactccagcctgggtgacagagcaagactccatct

SEQ ID NO: 1191 - DNA, 105 bp, Homo sapiens
ggagactaaggcaggagaatcacttgaacctgggtggcagatgttgcagtgagccgagatccttccactgcactccagcctgggtgacagagcatgactccatct

SEQ ID NO: 1192 - DNA, 564 bp, Homo sapiens
agagaatccaccagaaacacatttttttttcaagttttattttaagttcaggggtccatatgtgataaagtttatttttcaacttttattttaagtttaggggtccatgtgcagagtatgcaggtctcttacatacataaatgcgtaccactgtggtttactgcacagatcatctcatcacccaggtaccaagcccagcatccgcagctattcttcctgatgctctccttcccctcccccatgccatgaaacaggtgtccagtgtgtgttgttcttcctgatgtgtccatgtgttctcattgatctgcttctgctaataagttagaataataataggcggtgtttggttttctgttcctgcattagtttgctgggagtaatggcttcaaattccaagcgcatgcctgcaagggacatcatctcattacattttatggcttcatagtgttccatggtgtatggtaccacatttcctttatccagtgtatcattgatgggcatgtagattgattacatgatgttgctattgtaaatagtgctgcaatgaacatttgtatacatgta

SEQ ID NO: 1193 - DNA, 105 bp, Homo sapiens; identical to SEQ ID NO: 1191

SEQ ID NO: 1194 - DNA, 1996 bp, Homo sapiens
ccaacatgagccaccgcacccggccctctccatcttccttgaacgaccccattcacctactgctcctatttctaagactgtgaccaacagagcactggagcatgcagcagcacacagaccccccgcccagatgcctcgtcgtctgggtccccatgcttgccccaggtcccttgggccacgtactaatccccctctggagaccttgagggaggtaagattgggaattagcaatacctgaaatgtgttaattctctaggtcatgtttgactctactccagtcctcgtcgccctcttcctccaccccagacttggtgcaagctattccctctgcctacaacactcttcttctccatgtttacccacctcataaccactgatcctttaggcctcagcttttctcaacccccatgcagccattcaacagaatctggcctgtggcaggctctcttctaggtaacgaagctgcattccttgcagcatttagggacccagggtatcaagggctccgcaattaactttgacacatggcttccaagatcgccctgaccctgaatatcccaaggccagacaggagaagagcgaaattggagggctgtgtgagaggcattttggattgggactggaggtagggaacatccctttagccttcattccactgcctggatagctttcacatggccatgcctaatggccagggaggcttatgaccatggtcagaaagtcagctgtgtttccagggtgacaaaggaacaggtttgtgaatcatcatggtctgaagttcctggtacacgggatccatttcactcatcttgcctcatagagaaccctcattctcacctcccacaagggagaaaatgcaaagtttcatgcagtcactgcacagagtcttccagtgatgtgcatttctggacatcaagcctgaaagcggtacatcatagtttgtcaatgtaaaaactaaaataaaaccgtaacaattccccaccacacaccaaaaaatacctaacatcaggttaatgttacctccctccctgagtacagaaacaggatacgcacaaggaaaactgccattagaaagggaaggcttggaggcccatggcagttcctggtccacagcaattataaaactcttctgggcaggtactgtgaagtcctcatactcctgctggttcaaaccaaggacccaaggttgttttaaggcatgaacagttaaaggagtttggggtcctagcatgagctggttggtttcttgggcaatgcaagtttctcagaaatgtaataggttctgatgtacttgtttctagttatttccatgtatccatagccatgtccagagtttcttgttgtacataattccctaacttgatgaattatgctttctagttcatagacttctctctctctaatgatagagtttatgcaaaaccatcagacacaggtgggaagattacacctattattattacaccaattatttcatcttttctacagggctcagtcttaactggccacttaaaggatttttcatacttattttctattattgagctttaggtacaatcagctttttcaaccctgtgaaataccaaatttctgggtgatctgttctctatatcatttatatcatttataaactagcccttccttccctgagcctatttatctcctctaataagctttttaaaagcacaactaacaggccaggcacagtggctcacgcctataatcccagcactttgggaggccaaggcaggtgaatcacttgaggccaggagttcaagaccagtctggacaacatggtgaaaccccatctctagtaaaaatacaaaaattagctgggcgtggtggtgcacacctgtaatcctagctacttgggaggctgaggcacaagcattacctgaacctgggaggcagaggttgcagtgagccgagattgcaccactgcattccagcccgggagacagagcaagaccctgtctctgaaggaaaaaaaaaaaaa

SEQ ID NO: 1195 - DNA, 1997 bp, Homo sapiens
ccaacatgagccaccgcacccggccctctccatcttccttgaacgaccccattcacctactgctcctatttctaagactgtgaccaacagagcactggagcatgcagcagcacacagaccccccgcccagatgcctcgtcgtctgggtccccatgcttgccccaggtcccttgggccacgtactaatccccctctggagaccttgagggaggtaagattgggaattagcaatacctgaaatgtgttaattctctaggtcatgtttgactctactccagtcctcgtcgccctcttcctccaccccagacttggtgcaagctattccctctgcctacaacactcttcttctccatgtttacccacctcataaccactgatcctttaggcctcagcttttctcaacccccatgcagccattcaacagaatctggcctgtggcaggctctcttctaggtaacgaagctgcattccttgcagcatttagggacccagggtatcaagggctccgcaattaactttgacacatggcttccaagatcgccctgaccctgaatatcccaaggccagacaggagaagagcgaaattggagggctgtgtgagaggcattttggattgggactggaggtagggaacatccctttagccttcattccactgcctggatagctttcacatggccatgcctaatggccagggaggcttatgaccatggtcagaaagtcagctgtgtttccagggtgacaaaggaacaggtttgtgaatcatcatggtctgaagttcctggtacacgggatccatttcactcatcttgcctcatagagaaccctcattctcacctcccacaagggagaaaatgcaaagtttcatgcagtcactgcacagagtcttccagtgatgtgcatttctggacatcaagcctgaaagcggtgacatcatagtctgtcagtgtggaaactcaaataagaccgtaacaattccccaccacacaccaaaaaatacctaacatcaggttaatgttacctccctccctgagtacagaaacaggatacgcacaaggaaaactgccattagaaagggaaggcttggaggcccatggcagttcctggtccacagcaattataaaactcttctgggcaggtactgtgaagtcctcatactcctgctggttcaaaccaaggacccaaggttgttttaaggcatgaacagttaaaggagtttggggtcctagcatgagctggttggtttcttgggcaatgcaagtttctcagaaatgtaataggttctgatgtacttgtttctagttatttccatgtatccatagccatgtccagagtttcttgttgtacataattccctaacttgatgaattatgctttctagttcatagacttctctctctctaatgatagagtttatgcaaaaccatcagacacaggtgggaagattacacctattattattacaccaattatttcatcttttctacagggctcagtcttaactggccacttaaaggatttttcatacttattttctattattgagctttaggtacaatcagctttttcaaccctgtgaaataccaaatttctgggtgatctgttctctatatcatttatatcatttataaactagcccttccttccctgagcctatttatctcctctaataagctttttaaaagcacaactaacaggccaggcacagtggctcacgcctataatcccagcactttgggaggccaaggcaggtgaatcacttgaggccaggagttcaagaccagtctggacaacatggtgaaaccccatctctagtaaaaatacaaaaattagctgggcgtggtggtgcacacctgtaatcctagctacttgggaggctgaggcacaagcattacctgaacctgggaggcagaggttgcagtgagccgagattgcaccactgcattccagcccgggagacagagcaagaccctgtctctgaaggaaaaaaaaaaaaa

SEQ ID NO: 1196 - DNA, 1625 bp, Homo sapiens
gaagctctctgggtagtgtgagcagttctcaacgtgcaccttggaaagcgcccgttttgaggtttagctgtggccaagatagatgacttcattttgttgctttttgttcttaacatggggagatatttagaaaacatgtttggctcttgctggggaagcagtgctgttccgtacagtgttttacaagccgtgtttccttaggattgaaagaaggtggcaagaggaagaagcagaagcagagagaggagtcgaagaagaagaagtcgaccaaaggcaatcactagaccggacttgaggcacgcggtgcacccccagacgctggcgctccaccgtgctcggcatgcggtcgtgcacacgcgctaggtagcagcgtcggtcaggactgtctcgaggccacactcgctcggcaggattatgcgatcacggatcagtcagagcagggtcaggagacggggctgacggcacgggtggcggggacagacgtttgggacttggccgcgactctctgcttctctccagctctcaatctgctgcattttcctctagtgcttccggatcctcttcattcttttcggctactcaaccactccgcatgctgctggaatatttctggctttagaagtacaggagggcgcagatggctaactgagtaacattcatgaaatgaggctttctgtggcggcgtagtgtttggaattagaaggtaattcagtagagtgtaacttagagaatattgcaagtgacacattgaatcctgcccgtcagggcaccttttcctcagagcaatccggccacacgaatagaaggctgtcgtgaatcacatcagatgtaaaatcattccttctgtttactcttttaattttcatcctttgcaggtagtgcaaattcaacttcaaatatggtgtaggttttgctagattccatatttttttcttggatttttgctaattatttttagcaaaaaatttttgctcagtggcactctccctagtgtccatgggttagggccatgctggggaaaacgggccggtatttacacacgcgcaaaacacccagagacggcacaaggaggttgaactcatgtttcagttcgcgaacattgactccttacgaaagtcacttcattctaactagatgcgcccacttccggtcattatttcgtttgcatgatgtattgcttcttcacgttttgtttttattgagcacggagtagaattccagggctgccttgacttcttccctgcatgctccctcccagtgactttccttccctttcacatgaggatctgccgttcatgttgctttctcctttgtcctcttggacttgagggcattgtgaaaagctttgctgtgatttaaaaatgccagcaattttaatctagcagtgttgaagctgggaattttttggcgcaatccatgtagcagtgacccaggcttgggagccagaaacaagtgtgacctgggattttatttaacacaactgttgccaaagagttggctttgtttatttggttttggcggggagaggagtggtatttgatgctttctgtggacaatgtaaccctaaacacatcatgtattttaaatgccacctacataaataaaacataagcatattgaataca

SEQ ID NO: 1197 - DNA, 764 bp, Homo sapiens
ctggggcgagtcctgagtgtgggcagggcctcaggcccccaagagggctgtgagcaggcaccttcctgtgaggcacgatgccaccatgtgaagttgtgtgggtctttggagagttctggcaggttgagggcctgtgcgtgtgggacccaggcctgccctgcctgctgccggccatgttccctctgcccagtcatgttgacaattgtggccaaattcaacatcgggcctgtttcctgcacccacgttggcacacactgagttcaagacagtttctgcagaaatgaatccagaggtgtttatttctggcacgttggatcagacgttcagagggtgggcgtctttctccatgcacttcagctggatcagtcagtgtcagccattgactttagcaacagggaaatgaaagactttcctcaataagaaatgggactttctcacgctggatggcacagagctggcaaacatgaggccagtccacaccaaggctttgcctgcagaaaggctgcactgtggccagcgggggaagcggaggagacacctgtggacaccctccccacaggtgggcacacctttgcgcaggcccagtgtgcgttctgaaggagagcccagggtggggttccgggactgaggtgcagccgtgtccagggtgggcttctagctctgccgctgggcggaactggggtaggtcccagggtggggttccaggactgaggtgcagccgtgcccagggtgggcttctagctctgccgctgggcagaactggg

SEQ ID NO: 1198 - DNA, 259 bp, Homo sapiens
cgagactccgtctcaaaaaaaaaaggccgggcacggtggctcacgcctgtaatcccagcactttgggaggccgaggcgggtggatcacgaggtcaggagatccagaccatcctggctaacacggtgaaaccccgtctctactaaaaaatacaaaaaattagccgggcgtggtggcgggtgcctgtagtcccagctccttgggaggctgaggcaggagaatggcgtgaacccgggaggcagagctttcaatgagtccaga

SEQ ID NO: 1199 - DNA, 1403 bp, Homo sapiens
gatatagcttagtataaaaataaaattcaacgttttggccaaaatgtttgtttttcactggattctgaatataataaattcaaagtaccctttttttagagtttctaataaagtagtatgtaaaaagaaactgcattttaagtcagacagtaaatgttttttttaatttacagcaaatgaagcagttttattagcatgttacaaatattgccaaaccaagacttctctaccatactttaacagctttccttcagaaaactctgaagttatatttgcaataataatgaaaccagcatttagtaccagcatatggttcatatgcaaataatactttccccaaaatctttctgggctaggctattttcttgctatgcttcctgcacccaaccagcagaattcttccagggtggaggaactaatcagcttgttctccaacagttctgaagccaacccacaaatctttgaggaaaaggggtcactttgtttactattctcttggagatggaagtgattctgctcttccatttgggtatattatttcaagggtatttcttcttaaaaatcttggaaagcctaagagagttaaaggcatcctggttttgtttcattttgctctgttttaaatccatatgcaaataaaactgcttctctcttacactgcttgaactagaaaatcagctttttaatgtaggttaccacttataagcacaaaagaaacatgtataagaaaccagatttaagtgttttaaataaaatgtaaacagtttttatttggtagagatgactcatggaaaaattgtgttggcttggtctgcatgtttaatgatgtgcttgtatatcgattagctgtgtcacttttaaataagaagtccacacaagcaagccaaatttttagatgacgaagtccataaataactagagaatttttgttatctgttgttaagttgaaatgtataatcatttatcactaaattgcacattgcctttatttatttgtgctctgtttttggtttacagtgtaataatacctcatttaaaaaataaaaaccactactgttacattttattaatttaaaaagctagaaaattcatgtagttactttttttacatatataatctgttaatgaattattgatttttgtatctgccacagtaaattaaagcattacacagtatttatcagtattttttaaacatcctgtccttttttaaaatctttgcttagtcagtcatatttttgtctgtatgattagaagtttttacgtccttccttttttgtacaaatctgtattgtattaatttctggatgcaatttttcaaatattaaaattatacagtcagtcaggcttcagtttattttttgaacacttgggcaattaattaaagccatatgtttaaaata

SEQ ID NO: 1200 - DNA, 18733 bp, Homo sapiens
caggaactggcgctgaagaccctggggacagatggcctttttctcttttcctccttggacactgacggggatatgtacatcagccctgaggagttcaaacccattgctgagaagctaacaggtaccaggagagactggcggctggggaggagggcgccttggccaacggtgtcttcactgagcaggagcggccgtctggagtggagggaagctcgtgggatctcagaggccctggactcctcccagctctgacactttgtagctggtggcttgggcgagctgctccagcaacccctgagcctgtttttctcagacttgtgagcaataataccagctaacattctttggtctgcgaggtagctcacgcctgtaatcccaacactttgggagatggaaggatcgcttgagcccaggagttcaagaccagcctggtcaacatggcaaaaccccatccctacaaaaatacaaaaattagccgggtgtggtggtgcacacctgtagtcccagctacttgggaggctgaggtgggaggatcactagaggccatgaggcagaggttgcagtgagttgacatcacaccactgcactccagcctgggcgacagagtgagaccctgtctcaaaacaaacaaacaaagcaaaaccaaaaaaacaaaaaaaccattccttggccacctcctccgtgccaggtatttaagtatttcatgtgggttctctctttaaacctcacagtagccctgggagatggacactgtcatgatccccatgtttaatagtctgagagactaaggcacaggcaggctccccagtttcccaagctagaaaggtgcggagccagggctagaactggggccatctggcttcagggtcctgcaccagctcacaggtttcagtagagaaaagaaatgcacagtgacgaatatgcagtagatttccaatagacagcagctataactttttttttttttttgagacagggtcttgttctgtcacccagactggagtgcagtggtgcagtcacagctcactgcagcctcaacttccctggctcaattgatcctcctgcctcagcctcctgagtaagtgggaccacaggcatgtgctaccacgcccagctgatttttctatttttgtagagatgcagtctcactacgttgcctaggctggtctcaaattcctgggctcaaacgatcctcttaccttggcctcccaaagtgctggaattacaggtgtgaaccaccgcacccagccaggagctataactatcattactaaatctgaaactttgcttaggtgctttcagatttctattccattctttgttgttgttgttgttgagatggagtcttcctctgtcacctagactggagtgcagtgacataatctcagctcactgcagcttctgcctccctggttcaagcaattcccctgcctcagccttcccaggagctgggattacaggcacctaccaccatgccgggctgattttgtatttttagtagagacggggttttgccttgttagctaggctggtctcgaactcctgacctcaagagatctgcccgcctcagcctcccaaagtgctgggattacaggcgtgagccactgtgcccggcctcctattccattcttgctatcatttttgcctagtgcagtcagtgattatttatttatttatttggttaaagatgaggggctgaaacattctaatgaattataaaacgcttctctcgctgccccaccaccaccctaacctctgtgcccattttcttccaacttcttgtgacgtttcttgaacttaggatcttggacacctacttattacccagattgcctggtgtaagtcagtcattgatgggaaaggcaagagagacatgctggctgtttcgggtgcataagcttcaaagcgctgtcactagcctgctgtttttcaggggtgtattgtgtaggttggttccgtgctggcccggtgacctgtgatcactgctagaggaggaaggttggatgaaaaatgctaatgagctggagtggatgtgtatcaatgtctctcagtggcaggcagttctgtcatgaaagcagatgggcagataaacaggtcgtccccttgtggccttgcctgtacttcttgttttgcatacacttctgcgcatttgcacagctacctctttgtccttttttgtggccagagtgagagttctctcataatgacatgttagcaaagcttgaggtgcacttttaattttttgcacagaaatctttttctccatcagggtaaaagaattcccccattacctctaggctgtgaatgcaaaaatggaccaagtattgagaaatcaaagggcagggggaatcaaatccaagcaggaaatagagccaactagttctatttggtagagttatgagagtgtttaattttctgccttatcccttaaaatttttacaaattacctataatgggcaaatgttactcataagtcaggaaataaaactttttattaaaaagccaaagggctgtaaaatgctgagtagtagtattataattaataacattattaccaactccatttgacaaatgagaaagcaaaggctcagagaggtgaagtcccttccccagatcatacagctaggtggtgggggcatcatcattattattggtttttgttttttttgtttttttgtttttttttttgagatggagtcttgctctgtcacccaggctggagtgctcggctcactgcaacctctgcctcccaggttcaagcaattctcctgtctcagcctccagagtagctgggctgggattacaggggtgcaccaccatgcccagctaattttggcatttttagtagagacggggtttcatcatgttggccaagctggtctcaaactcctaacctcaggtgatccgcctgcttcggcttcccaaagtgctgggattacaggcatgagctgccttgggaatcattattattaatatttatctgtgatatcagtaaaataattgaataagcaaggcttactaataaccctgcatattcctgttgctcccttcttcttgggtttctagattgcgttttggaaagttttacctcattgacttacaaatacagaaataagtgattcttcagaatagggatttggatcaggagcagcagggagtgctcattaaaagggcagattccagactctcacccctgcagattctcattcagtaggtctgaggtgggttgtgagcatctgtagtttaaaggcatcctgggtgattttgaggacttctggttgagaactgctttaatgcatcattcagcctgctagccagtcagtcagcaaatgccaggcatcatctctgtaccactaccctgccctgagagggcagacagggcaagacccacccccgccctccgctggctacactttgttactggtgactattactcaccccttttgaaataggcgtcatttgtcccttagcctttcaaaatgaatccttctatactgggaaggttatagacttgccagatctctgagcaggaaaagatccaagaaatcaaatccagccacactgccagtccagcccctcctacagctggggcaatgccccccccgcccccccccccccgccgcaaaaaaaaaaaaagcaggggaaagtgggtctcctcactctcaaaccagtgctctccctatgacaccaaagagcctgtttctgtttcttgcttcattcattactccggttcccttgactgagttcctctcagtcccagaagacctagaaaagggtcgtggttggtcatgggtttcgagtaaacaggcctgggtttcaatcccgattcccccaccatctagctatgtgacctggggaagtgactttacctctctgaacactttctcatttgtcaaatggagttggtaatgttattatctgcctccctgggctatcctgaaactaaaatgcgatacactggttgttactttggtgactgttaacaccccagctacccccaccccctgcctggctccgttaatcaccagctagtgtggatgatgagggagaggtgagccctgtagcataagggcagtgcctctccgatgtctgtgtctcatagggtcaactcccgcggccagctgcgaggaggaggagttgccccctgaccctagcgaggagacgctcaccatagaagcccgattccagcctctgctcccggagaccatgaccaagagcaaagatggcttcctaggggtgagttggggaccacaggcagtggggtcatctgtgtgtatcccgaagatgagtttctgctccattcatccatctttcctctgccctctgtgtgcccactagagccaggccctggaggtccatgtgcggtgatgttgtccctgctgtccaggcatacagcctgctgggggagcaggagagagaagcattagcttctgccccagactggggaatctgggatagcttcctagaggaagtgacatctggtagactgcaggatgaggagggctcagcagggtgactgagcacaggttgggggggtctcggaggaagcagcagtgcagtagagaccctgttagtgcagccgccccacatactatgatgattatttcccacacactatgatgattacttcccacacatccatctcttccccacggggcatagcatgatgcctggctcctgataggtactctgttgaactctgatgatctagacctgaggtttggtccccagcagagggctgtggggtggggagggcacctgagaaggtggaggtaggaggtggacagatgctctccttgccagcccctccccaacccaaggccctttggacagggtcctgagcgcattgcaggatgaagctgcctcagcccctgcctgcccttttgcactctctcccactctctcctcccctctgtgggcttcctctgttccaaccacaccagacttccttccttccaaatccccaggctttcttccaactgggagccttctcacatgtggttccctctgccaggaacactgcctctctgtgcccagcccacacagcccgacccagccttttcatctcagccaatgccacttcagcacgaacagaggcctgaaggcaggagtgccaggctggtcactgaggccaggcagtgggtgtgtctgggcccagggggcatgcaggacccacacaggggcatcccaatcagtggggccaggagagaaggtgccagaccccaccaagggctttgttgcctgcctttggccttcattctatggtggctgaatatcgtgcagattttaaataagacagctttctcatcagacctgggctctccaggccagggacggggcatgtgtagaatggggagaagtgggaggcaagaagaccagttctggaggggagacggaggagatggagagtaagggcagcctggaggatgctggggaaggaagggcagggagcggctcctcatggacagtgggtgggcaggagttggatgactcaggcttctggctgtgaccaggggcatggtgggctgcttgcccagatggggactgtaggcggggagggagtaggggatagagaatgaggtcagtctgcacatgttgaagttgaggtccccaggggatgttggatgtctgctgcccagcagcagccccttggcagtgcccaactctagagcctggcagccacatggcaaaagaaacttgggaatgaccttgaggctggcacctgtggcggaattgccacctggcccagcccagggaagcagtgctggggagcccctttcttttttttttttttttttttgggacggagtctcgctctgtcgcccaggctggagtgcagtggcgcgatctctgctcactgcaagctccgcctcccgggttcaagctattctcctgcttcagcctcccgagtagctgggactacaggtgcccaccaccacacccggctaatttctttgtatttttagtagagacggggtttcaccatgttgaccaggatggtttcaatctcctgacctcgtgatccacctgcctcggcctcccgaattataggcgtacagggattatagggattacaggtgtgagccaccatgcccggccgggagcccctttcttaacctcatcgctgcaggttcagggagggacagaaattccaaggaggagctcacagggaagggcattgcccgttttgggtcctgtttacttgccgtctcccactataagctccaagaagacagggtgcacagtgtaccctgatagaaacttcctatacagtaggtgcataaaacattttgtggaatgaacaaatgaataaacgtgttcttctcagccaaggagacagtgcagcagataggcaggagtccaggaagtggtcaaaaccggtctgaccttccacaaaaggagatggggaacccatctccatggatttggcagtgatgggctggtctgagcagataagtccgcacagacaacaagaactggggtgaggcaggagcagcacccctagccctggcccccgagcagagccccagcaagcccagcacccatcgctggcaggtcccctgcagggggtggcaagcctacaagcaggacccaggaaggcgggctcggcctggcccggcacagccagctctgccttgagaaccgcctgttaaatctgtctctgtgggagctccctgcctgctttcctcctacctcccaccaagcctgagctcctgctgccagggaggtggcgacagaagagggaatctgctgttccccaaatgctggccgacgtgtagacagctctgtggtctctgagcgtcctctccgagccatcagcttgtcagacagaggcgaggcaggtcaccgatgaggactcgggcttagggaaggccttttgcccagggtggggcaggctgtacttaaggcagggcccttctgggggtggccttccttccccttccctgtggtctcatcctgctcttgaccctagagatttcacctcaaacatgattggccaccaccctcatcggacttagctccaaaccgaaaccctgagctggccagtgggacattagtccctgggaggagacttggagaggagactggggagggagagtagggctgctggagggccagggaagccaggcagggtggtggcacccaaggctggcccatgggcttatgcataggatggaggtgggactatgtgaggcacagagccccaccatccccattccaaccttgccctcgagcgagctgctctggcctgggctgcgcctgggtgggctgtgcctgggtgggctgtgcctgggtgggctgtgcctgggtgggctgtgcctgggtgggctgcagaggcactgcagcagggagaggagcctctctctggcgggatattgctaagcttgtggccatcataagggcaggaacctccctggggtccatctgctcccttggtgtgggctggctcggggcttgagggagacctccacccacatggtacaggagaccccggagtcaggttctcagattcctggagctttgctttcccccgccccaggtctcccgcctcgccctgtccggcctccgaaactggacagccgccgcctcaccaagtgcagtgtttgccacccgccacttccagcccttccttcccccgccaggccaggagctgggtgagccctggtggatcatccccagtgagctgagcatgttcactggctacctgtccaacaaccgcttctatccaccgccgcccaagggcaaggaggtgaggacagctggggtgcgacgtggggcccctccgcccgagcccaggagtggccacccctctgtctgcgcctggaccccagtgccaggcctgctccacctgctctcctgccttcctctggacctgccccctccccatggggcccctgggccgtcgggtctgggctgacccccaccccagcggatccaggcccagcgggacccagcaagccagtacgtgcctcccgccgcccccaggtcatcatccaccggctcctgagcatgttccaccctcggccctttgtgaagacccgctttgcccctcagggagctgtggcctgcctgactgccatcagcgacttctactacactgtgatgttccggtgagtgggccacactggctggcctggagcaccggggaggcatgacggtacagcgcccagaggggagggcccagcttgagccccccagctccacctctcctcccactgccgtcttgggcaagcagctttggctctctgagcctcagttttctcacctgtggatccgggtgctgatgacttcctcgtaaggcacgtgagggttcagaaagaaaagttgtggaacttgcttggcacggggctggtagccatggttgtgccatccacacagaagtgggaaggacacccagtcacacatgccctccagaagctgtgaaggctgggggagggggtccaggcagggcttccagaggaggggcatgtgacccgggcctcgaaggatgagcagcatttggagagcctcgctgctgcccactggcccatccacctccacccccacactcagcctcctctccctgatgattctggccaaggcttcccgggctcctggggagaaggtgggcagctctggtgcagcagatccccttccccacaggatccatgccgagttccagctcagtgagccgcccgacttccccttttggttctcccctgctcagttcaccggccacatcatcctctccaaagacgccacccacgtccgcgacttccggctcttcgtgcccaaccacaggtgggagcttgaccctggcccagccttggctccctcctacagcttgtcctgctccccagctccaggagcctaggggcctcttctgtctctgccccttcctttgctccccagagcccatctcatggggctgacgtggcaggaggcggcatgaggcaggcaagagaatgagctgatcacccaccagctcttcccaggcacccgtggcctggccctccacctctgtgcctgggacccagtgcagcagtccgcagacccttcctgaagctgggcctccccgccctcatactgctgacaggccccaggcagagctgtaaccgcagcctgtgcacgccaccaagaggaaggccagcagctaggcagggacccagctgtggggtccaggaaggcttcccagaagaaaaaggtcatctcagcagagatcagggctctgagggttttgctgggcagaggaacagcacatccaaaggccaagggcaggccctccactgctgcagagccccagaggggcttccgggacggtgctacaccagccacctgcttgcctcacctcctcagggctggccacctgtcagcagagtagaggaccccggaggccctggcttcaagtttgtccagattcctaactgatagcaagtggccaccgagtgggcctgagtgaccgctctacagggatgagacctggctgggagccaggaggtctgcagttaagtctctgctgtggaacccattggctgtgtggctgtgggcaaggccctggccctctgtaggcctgtttcctcatctgccggatgggagactgactcctggcctacttcacccacagggcaggcgtgagaggatggtcgggataacatgggaagagaaaattgcccctaggagtgggggtggcttccctccctccccagagtgggaagggcaggggcttcccggtcaaagggaaaaggaagaggagggcacaagccctccatctgctcacctagggctgggcacacctgcctccatcgcagggttgttgaggagggggcctggactgtatgggacaggaggagagaggcagtggccagctccaggaccagctgttcctgggctcatgtctgaggaccaggcaccagggactgctgacccccgggggttacctagctctgccctctgtgccccctgctgcggaggtggtggtttgccagtgctggggctccctcgtgcggcggatctgcagattgcactgctcggctcagatttcctgctgcccgccagaggcctgtgcagggaccacggtgctcgttttcattcctgccccaccctgtgacccgccttgaggcactggccatctctctgcttcaaagggtcctggagagtacacgggccatggctgtgcaggccctttgtgaattgcgaggggcagggctggcggatggtgaagtggctccagtgccttaggaaggggcagcctggtggggaagagggccagggctctgcagccagaatcccagtggctctgagagcaggtgttcaccttgagaaacctcagtgtcctcatctggaaagtggagacagttgcaggtattatgtgagataaagtgtgacacagataatgggctttgatgatggtgtcactctgccctggccatcccaggtctctgaatgtggacatggagtggctttacggggccagtgaaagcagcaacatggaggtggacatcggctacataccccaggtgagcgcacaggaggctcccatccaggtgggctcggctgcagggccccgccctccctctgcaatgagtggagcattttggagggtctctaggggagcccctgaggattcttgcccatctctgagccttccccctaccactgacctctggcccagatggagctggaggccacgggcccctctgtgccctccgtgatcctggatgaggatggcagcatgatcgacagccacctgccttcaggggagcccctgcagtttgtgtttgaggagatcaagtggcagcaggagctgagctgggaggaggctgcccggcgcctggaggtggccatgtaccccttcaagaaggtgaggctgggcaggggtgaaggccagggtcaggctgcatgggcagaggctgggagctgtggagcagcagctgggcacagacgctggtatgtgtgcagggcttgctactgaggctgtctcactgttgggcccagctgtgccagcggggcctccccgctgccattcagaacttggaggaagaggccaggtgcaatggctcatgcctataatccaaaactttgggaggctgaggcagagaatcacttgtggccaggagttcaagagcaatctgggcaacatagcgagaccccatatctacaaaagaatttttttaattacctgggggtggtggtagcacgcacctgtagtaccaaagctttggggaggctgaggcaggaggactgtttgagcccaggagttcaaggctgcaatgagctatgattgcgccactgcactccagcctgggcaacagagtgagactccatctcaaaataaaaaataaatgaaaataataataataaatagaacttggaggagacatccatcccctggcttagtagcacccacttcacacacatacaaacacacacactaacatatatatacacacacacatacacacatatacaaacatacacaaacatatatacacatacaaatgtacatatacacagacatacacacaaatatatatgcctacacacaaacacacacacacacacacacacacacacacacacacacacacttgcacacactacagactcagcccgagtgggaccctggccgctttgatgatggcttcgctctgtctcggtgtggccccaggtctcctacttgccgttcactgaggccttcgaccgagccaaggctgagaacaagctggtgcactcaatcctgctgtggggggccctggatgaccagtcctgctgaggtgaggggcccggctggatctaaggggagcagtgggaaagtccacaccttgtggggtaccagaggctctgagaccaatgggactcttctgttgagttgtgagggcctcagggactgcccatggtaggggcgtggggtgagggcttgggggtttctgtgctgagcccagagggagctaccagatgctgaagaaagggccctggcagactgggttcaaactcagccattgtcagcttggtaaccttgaccaagtgtcttcccctctgtgagcctcagttttctcaatagtaagaggggataacacacttacctctcatagctgtggacatggaggtgaaagtgccgcatacactgtaaagtgttatatacgtgtaagagaaaaaatcgggccagaggctgggcttgtgttaattgattcaggaaattcaccagaggccccctagatgcaacgtcctttgggtgtctggcagtgggcacaaagatgaacaaaacagtgccccaccctcaccccgtcaaccgtcagtgcagcagtgggctgggtgcttgcgtcccacagtgaggaaggcagaaggggtccctgccctcaaagggggagacacagtgcaaaggcagacaccaaatgagtcagtacaagcacggtgagtgttctacaggggacagtccagagtggcaccagagtgtataactgggggtcagggaaggctttgtgaagacagtgatatttacgctgagactttgaaggatgagtaggagtttctcaagtgaccggatggagtgttccaggtagaggaacagcctgtgtgaaggccctgggacacagagcgttcattggatttaagaagctgtcactgtctgcaagtccccagggccaggtagaacccctaaccctaatctcagcccaggatgctggtatattattgatgttaattccaactatcatttattcagcacctactctacctcaggctctttgaatctgttatttcacttgggtgcagagactgtcctgcagcccgtgaggtctccccaaagcaagattgcaccccagcaagatgtgggggcgcctcacccttctgtcttcctgaacaggttcagggcggactctccgggagactgtcctggaaagttcgcccatcctcaccctgctcaacgagagcttcatcagcacctggtccctggtgaaggagctggaggaactgcaggtgagcgggcaggtggcaggaacaggagcgtccggaacagtggtgggggccgcggcatcaggagtgtgcaactgtccccacagaacaaccaggagaactcgtcccaccagaagctggctggcctgcacctggagaagtacagcttccccgtggagatgatgatctgcctgcccaatggcaccgtggtaggcacccccactcagaccccacagggcccaggcacctcggggccccgggagcaaccagcaggaggcgtggatgtgcagacttcatcaggcttcgggactgtccctgccacttcctggctgcaaagcctcaagctggtctcttacccagtctaagcctccgttgtccccgtgtagaaacaggaatcgtgatgcaggtgttggtcatcgggggctgcgcagcagtgagcatagtcctgaggcagagtcagcgcctccctagaaacacagcctggaagggaaggctcaccttggaccatggcggccagtcctgggatggaaggggagggaggagccaggccttgtgacagagaccaggagagggccctgagccaagattcaagaccccacctctccctaagggccccttacctagcactcagcaagtcttctcactggggcctcacagcagctttgggagatggatggtcatgaatacccattttataaacaaggaggcccagaaagttgagagactggacaaatgttgcagtcaattaagtgcagctggctttgaaccgaggcctgcccttgagcctcagatctccagctcttctgatcaaagcgacccctcatcctttaagtcccaaggcatggttagtgtgggacccagggctgtaggagggggccggcttcctcaggatcttaggatgggagcagttcaggagcaggggctgtcacgggagaggtgtccagtgagggtttggtgtaaaggaaagggcaccaggcggaaggcatctgctgtcccaggcgcaagggtgatgagatggtgtcggggaactggatgaggctgggcctggttgggagaaccaggcctcccattcatatgaatgttgattgaatgctgattcattcatttgttcatctactgggcacctactgtgtgccaggcacaaagataaagacacagccccgtgctgaaggagctcagtctctggagcgagaggccaaaggagaggcccattgaatgtgaggctgcagtgagagaagggagcacggagttcaggatgggagtccggggtcacaggaacagaggagaggggtcatttcggggggcgggggcagagggctagtagaagaggtgatgttggaaggtgttgggttttcacttggtaggcaaggcagggaggagccccctcgtcagacacagggtgatgagatggtgtcgggtgctggcgagggcttacggcagcactgcctgcccaccatccacctcagacaaggacagtcaaggcctgatagcatccctgcttctccccatagaagagagggcacagggagcctgggggcccccctccgccccacttgcctcacccggcccttctcccaggtccatcacatcaatgccaactacttcttggacatcacctccgtgaagcccgaggaaatcgagagcaatctcttcagcttctcatccacctttgaagacccgtccacggccacctacatgcagttcctgaaggagggactccggcgtggcctgcccctcctccagccctagagtgcctggacgggatctgatgcacaggcccccacgcctcagagccagagtggtcctcagcccatttcagactgcagatgccgcccactcccaccccactcctaggctgccttggagggtacaagatccactgagggtggccaccacagccttggctccatggtggcgggtagacaagggatgcctgggctgactgggcagaggaacctctagctctgactgtcactcggctctccctacccatttggctctggaagctgcttggcccccccagatcagggcctgggtgaactccctggacctttcctagccagccgcacagtctaggcccttgtggggtgaagaatggagggaggagcaggctaggaagacggggccaccaccctctccttgctttcagcccttcccacaggaaacatcaagaagccccagccaggaggggccaggctgccaaggcggctcccctgtttatctagagccttcgttcctggccataccccggactgccctcctgtgcctgatgtccccagctggggtcagtctcaacaggagccagtcttctggagcctctgggcagaaccctccatcagagtggaaatcagacgggaccccctgcagcttccctgaccacgccactgaccagctatctggggaagtttactgtgaaggggtttctgcctttagcaatggggttcactaagggggttcccgaggcccagggccaaggcactcccaccgcctaccttagcacagggtctctgcaggactgcgggagccagcgctcctgccgcccctcttgcccctcagaccttgcatccacagaagcacaacccagccaaacaccacagccttctccagagccggcactgtcccggcaaccaggggtgccccaggctagctcttctacctctggggcaccacggactccccttggccactcttgggactttggtccacgtcctgagccactgaccacggccagtctctctttttatatgtgcagaaaagtgtttttacacaaactttctcatggtttgtaggtatttttttataaccccagtgctgaggagaaaggaggggcagtggcttccccggcagcagccccatgatggctgaatccgaaatcctcgatgggtccagcttgatgtctttgcagctgcacctatgggaagaagtagtcctctcttccttctcctcttcagctttttaaaaacagtcctcagaggatccatgatccccagcactgtcccatcctccacaaaggcccacaggcatgcctgtactctctttcattaaggtcttgaagtcaggctgccccctccccagcccccagttctctccccaccccctcaccccacccggggctcactcagcctggcagaggaagaaggaaggcagacatctccgcagccactcctgggccttttatgtgccgagttaccccacttgccttgggcgtgtccactgagccttccccagccagtcttgttctcaattttgttttgttttgttttgagacggagtcttgctctgtcacccaggctggagtgctatggctcgatcttggctcactgcaacctccacctcccaggttcaagcaattctcttgcctcagcctcccgagtagctgggattacaggtgcatgccaccatggctggctaatttttgtatttttagtagagatggggtttcaccatattggtcaggctgatctggaacttctgacctcaggtgatccacctgcctcagcctcccaaagtgctgggattacaggcgtgagcaatcgtgcccagccttgttcttaattttgtatcatccagtcatcgctaatattacacgcaccttctcacttaatcctcacgacaagcctgtgaggcagatgctcattgttcccatcttgatgaaacttgagtctcagggaagtgaagtgacttgcccagggtcactcaggtagagttgagattcaaacccacatgtggctccaaagtctgcatctggatttgggggtgttttttggcatggcaccctcacctctctccctgcctgttttccccaaagtggaaaggaaggcctttcaaaccagagtgtctcactcccctctgacctccagaccagatggggcatgagccagccagctcagccaggctccctgtgtcctgggaggaagtgtccccatcccccatgccccttatggggagggagggcgtctgatgctctctctctgcctccccccccatcctgtcaggcacaggtgacgggggcagcccatgcgagcccttctcctgctgctctgggagggccagttccacattgagccagcctggtcccatggaaaatgatggcctgggctttctgaggccttatctgatgcctctgcagttcatgtcccccaccaggcctcgaggctcagggtgggagagggccccgggctgccctgtcactcctctaacacttccctcccctgtccccaacatgccctgtaataaaattagagaagactaactagagtggttctaagtgcttttcctttgagtggcatgttgctcagctccgtccttccatggggtggctccctcttggggcagagttgagctggaatgctttcaggtactatcttacctatcgaaggcttgagtgacttgcccaaaataagttttacgatagaacaagtggtaggacttactgttttgagaatctggtgctctctgttgagagagatctgggagttaaaatcattgtcttaaaagcagagcctgagacaggcatgaagtgtttttttgtttgtttgttttgtttgtttggtggggctgggggggagtgtacttccagaaaaaccagtaaaagaaggaaggaagcagaagagggaaaggaaaaatgctgagcaggaacagtctcagcccagccttggcctgacccacagtggaagagctgtggggcataaaccacactgcagagctgaactggccttttggaccttttatcagtcattggcttgggaggtgaaggaaattcccaggtagggagctccgttcttcctgcaaggggatctgagtgggacaccaaatcagcatctacacccaggacagacagccagcgtggacttgcatgatccgccatcgcacaggagggaaaggtaatgattaaaacacaatgtgccatcctgggaagagggccagacctggaagtcaatcttcagcgtttgagatatggtggagatcagggtggacgacctctgaggtctctagccaggaccagtcacataatttgcacagccccgtgcaaaatgaaaacacaagaacccctattagaaaatcatttcaagacggcaacagcaaagtactaaaccaagtacaggattctgagcatgcggcccgttgtgactgcatgggctgttcacccatgaaaccagctctgtctctggcagaggggactgcaggctttggaaccaaggaactccagcctgggagccaggcacagcccgaggctgtgctgaaggcagagaaggaaatgtgacccaggaactgcatgccacagaccaagacagtgagggctggagcacaaagagggagtgggttagtgagcctggaaggaatgtggctcttcccacagagcctctggagtcttgtacatcaagtacccatctaataagcaaactcattgaatataccgtgtgtgtgtgtgtgtgtgtgtgtgtgtgtgtgtgtgtgtgtgagagagagagagagaggctaaaatagaagaaagctgcaaagtgctggagggcaggagtcaagaggagaaagaggcccattctgcgcattcttgctggagagaggctttgcaaagggacctgcctgggaaccaagaactgggaagggggccagggtgaggattctgaagtttgccctaggggtaggagcatattttaggggtcgagcgacacacccctgggcttccagaagtcggatggggctaaacgtggagagcaacaagcagggagacgcgacgaataccaggccgagggatctccaaacgcagccaactcctcccggggacacagaccccgcgggggca

SEQ ID NO: 1201 - DNA, 12988 bp, Homo sapiens
gggcggttgaggctgggcggcccaaggtggaaggaggggccgtgaggtgagagagtccgggagcccgagcttgaggtgagaaaggttctagggaggcgcggaggcgggagcgcgaccttccagcccgttagtagactgggtctacgtgccgggcgctgtgcggagcccgcagctcctgttcccgcgcgagttctcgcgggagccgcagctgtccgtctcacttggcccgggggaaactgagtccccgaagggtagttgctcgtcggagttccccagcaaacagtgaccaagccagacctcaggcttctagtttcggcttcgctgcttgacgggccgggctgccccgccgcgcattctgagacctggccgcggctcggaggcttccgcgcactcgggtccgggtcctgtgggtccaagggccgctgggcaggcggcgagcacttggccgaccttggcccaggtcgggtcgtctgccgcgggggaggggcgactcgccctggcgggtccccgcggggagagggtccgcgcgggtctccggccactgctgcgcgcggcaaagtttcactgagcgcggcggcctccgtgggggcccccgggaccaggggtgctgagcagggccctgcgctggaggagctcccgttctcctgaggggacgcctgtcagcagacagcaactgcagcctccggagggctgcggggcgcagaggtgacaagacccaccggtgctgccggcgaaccgggggaagatcttctagccagtgacacttgggggcgggggtgacagctgagttggtgttccccttcattcgtttagttcagcgcgttgaagcgctcactgtgtcctaggcagacaccgtgctgtgcgcggggatcacagttatctagttcctctcgcgaggactccgagggacaggcagggtgctgcggagcgcacaggaaaggacctgaccctgtcgcagggaaggaaggtgatgcttaagctgagctctgaggaatgatgaagaatgagctcggcgaagggggtgctggtgtttgatgcagggctcagaggtgggcccagtgttgggggttgagggccagtgtggctggagggcaagggggagagcaggagggctggctgcgaagcgtgcaggccttggtgctcagtgaatgtggtctagagacggcagagaaagatgggtttgggactgattgtggattttatcctgtgttggctctagtaagccagttttaaacggatgagcgatgtgattaactgtgtttgggaaggattcctctggctgtgtgtgagggttaggcccggctgggtctttggaggtaaggtcggagaggaagtggcagtaagcaccgttagtgcaatttgtggccgacacggacattcagcacagagcctggcacacagagggactctgataataaaggcttgaactgagccgagaagatggagcccacgcaggaggtggcaggacctggaccaggctttgggtgctttgcactggcatgaccactgagtgaccttagacaagtgccttcccctgtccaacttcctttccccatgtgtatcgtgaagtgaatgacacctcgtctcccaagggtagaagaggggaccctccacaggaggtctccagaaagagctgctttgtcagtctagtctatctcccattcagagcctgtccagggctccccagtgacccggacctcatgacttgccccctacttttgtagctttatcatgctctgctcctctttccatgtccttcaccttcttgtgctggacctgtgctcttgctgttttgtcttcatttcctactccctcgcaacttactacagggcactagggccagagctctgacctcatctggccacctgcctaatgctactcagcctttgctagaagtatgtattcatgtcctatcactctgctggacagcgagttccttgagagcatgactgtgtcttactccttccatagcccctacggtgcccagcacaaggcctggcacaagtgggtactgttggtgtttgatgaacaagtgaatgaacgagcacactgattgcatctgctcaccatgcaaggactgctgtgaagagcagtcagatgtcacctcacccatctgtgtcatgttttaacagttcattaagcactcaaccccatttcactcattgacccttaaggtagcctccagtggcagcttttcctgtctcctttttccagatggaaaaaccaacattcagaaaagttaaataacttgcctgtagctacaaagccagaaggtggctgagccaggataaacttttttggctctttttctctgtagctcatgagactgagattggcatgagctggtgttcgttctcctattttctctgatctctccctttgcaagggcccagcagtgcttttacatctcatcttcaagaatgaatcctgggcttggatagtacttataatttggctagatgagctttgtagctaccaaggattctatttgcatctttagaagttttgcctcaagaaacctgagagcccaggaaggctcttgggttggccaagctcactaggcaaatcttttttttttttttttttttttgagacggagtctcgctctgtcacccaggttggagtgcagtggcgtgatctcggctcactgcaagctctgcctcctgggttcacgccattctcctgcctcagcctcccaagtagctggtactacaggtgcccgccaccacacctggctaattttttgtatttttagtagagacagggcttcactgtgttagccaggatggtctcgctctcctgacctcgtgatccgcccacctcggcctcccaaagtgctgggattacagatgtgagccactgcgcctggccgcagatctttaacagaacctttaagagtctggacttagagctaagtgttgggtgagggcagcctcttgggctggttttctcccctgtgaagtcatggctctgcagggcctggttttttggggcttgtgtggtgaccattaaatccccactgtggggggttgtttcacaagagggaaatctggtgctcctccagatggcctgatatgaaggagtcacgcctcccgcctcccggagctgcccagtggctgccttgtccttcaagtgcaggagctggttcaaatgtcaggaatggaagccactgtggtaaggggcattcccagggcaggggtatggtggggaaggttgggtgctgggcctgctgaagtactgtaaaaggttctgagactctccagttgagcactcctttctccagaggcctggaattggagcaaggccaccgtttcactccctccccctaagaagaaccaactatgatcctggggcacttcaggagtcagtgtatgtctgcctttctgtacagaggacgggaaggaaagcctggataatctctacactcagctacttcctctccccttccctgaccctcccaacattgactgccttagcagcagcaggtattcccttgggtggctggccagggtgtaggctggcaactggggaacctgccctcactataattgagagttgacttgcccctagagagtgccctgtccctaggtttgtggaattcagtctccacaaacctagagaggagaggacaaggacagtagttggattcattctctggggttgtagctgtctccgtctctttgctccagaccatcccaatctggcaaaacaagccacatggggctgctcgaagtgtagtaagaagaattgggaccaacctacccttgaagccgtgtgcccgggcgtcctttgaggtgagtatgttggaagggcaggagagtagaggctcagacagtgctgcttctgtgccccaaaccccttggtactgcccaagtaggttgtttcctggtcacttttcattctgttatgaaatatttgttaaatgcttataagatatcctggtcactgtgtcctcctgagtgcatacaaacctgtgaccacaaggaacctgacaggtcccccacatgggacactgactattgtgatttttgagttgaactctgcttttcttcaccagccctaagaattgaccatgtagccagtatttttattttattattttttgagatgaggtctccctatgttgcccaggctaggtcttaaactcctgggctcaagcagtcctcctgcctcagcctcctatgtagctgggattacaggcacaagccaccatgcccagctccactatttttagtgtttctctgaggccataattcctcagccttctctttttggccaatctgggcatcctttactggggtgctttggtcttacctctgtgtctagggatcctttagcacccactcagcagcagagattcctacctggcccaggtctcttgagaccccttctgtggtagaaagctaagtagcatttattagtcccagctgcctccctctaggaactaaatggttaagcaccagccccaaactatatggttcagatgtgtgcatttggagagctgggatacaaaagaaatacttgtgctttctacccacacagaggagatagaaatatgtgcatgaaaggatgtgggcccaggtagaaacagaaatgaaggagccaaatctgtataaaagatgctaagaagcagagtctgtaggaactggatctggaattagaagaggtgtcagggttggtattagggtcaggaatggagttggaagtgtcgcaggggtagggggcaggaaaagctgtcccagtattcagattgccagctatccagaattgtctaaagatcctgggcaggaactggtcctaacttgcctcagaagcatcagaaaaaaaaaagggagacagctagggagtgtggctcactgcatagaggccgtccccacacttggctataccctcttcagttctttggccagatgctgggcagagacaatcaagggcacaggctctcacagagcaggaatgtatgtgagcagtattggtaatactagataacatttactgagcacatactatgtgtcaggcactgtgctgtactttatatttgtttactcatttaattgccaagagcaaaggagcattcagggctaatcaggaaaacaaatggaggcttcccccaaatgccctattttagcactagttcctgggtcactggaagttcttctctgtgtgaccttggagtatcacttaactcctgtgagtcccaggtttcctatctaaatgcaggagcgatcaatcctggatccatctaccataccaaataatttgtagcagaaacagttgaatcttacttgtgtgtaaatatgcatttattattattattaaattaccttaaatattatttaagggactcttaccaatttattttgaaaatttaagcatatgaaaatattaaaattatgaaaagtaaaaggaaaataaattacctataattacatagtaataatacaataactattaatgtcttagtgtagtcctctttttctagatggatgttttttactttgttgtaatcacagtcaacatgactgaatcctaatttttcactttactcaacatctctaggttgaggagctattttaagaaatcctattatggttccttttgtataatcatttatttttatttaaatctaaatatattcaaattttcaggtttgtttaaaacagcattgctgtaacaatgtagatctcaattagctatacaggattataaaaagctagtcaggaaaaatttcctattgctgtaacaggttgtggatgaccttgtacttgtattttcaccagagggcacagtggttttagacagttgccatctctactaaaaggtgactcaggccttttccactgaagacacagaactgtttgtaatcccatagactctcatgtgtcttgcctgtttttgtttttgaatgtggctctgttgtccacgctagagtacagtggtgcaatctcagctcactgcaacctctgcctcccaggttcaagccatcttcccacctcagtctcctgaatagctgggactacaggcgtataccaccatacccagataatttttgtattttttggtagaggcagggttttgccatgttgcccaggctgatctcaaactcttggtctcaagcattctgcctgcctcggcctcccaaatgctgggattacaggtgtgagccaccatgcctgactgtcatctggcctctgttcaatgttttcgaccaggaaccttcttctgccccctctaggaagccttcctgacacccagtgccggattaggtacccctcctgtgtattctgcagtttctgattggctcatcatggcatctgtaaatgttgatgacttttgcttctccatagaccctgcccaacatctctgacctgtgtttgagagatgtgcccccagtccctaccctggctgacatcgcctggattgctgcggatgaagaggagacatatgcccgggtcaggtagttgaggcagtagctggtctgctaaggaatggagaacttcccagaagaggtggcaggcagcaaggagagaggaatgagaactgtgggctcagagaggagcagaaccttactatactactctcacagaagtgggggaaggaaccttaggagcacagtggcctgctgtctctaactgatctacttggttttccctggtccaggagtgatacgcgccccctgaggcacacctggaaacccagccctctgattgtcatgcagcgcaatgcctctgttcccaacctgcgtgggtccgaggagaggcttctggccctgaagaagccagctctgccagccctaagccgcactactgagctgcaggacgagctgagccacttgcgcagccagattgcaaagatagtggcagctgatgcaggtaggagcccctgtgccagggccagaacgtaacaggctgttcctttcccctggctcttgggcaggataggggtaaagaaagtggtaatccttggtttgcaggtacttaggttccgggccctggggttgtcctgaagcctggctagccagtagtgcctcttagatggtttctaccagccattttgggctgaatggtttggttaagaacaaaatattaacctgtgaccccaggcagagtccctcccttagcccccaaactgataccctcttctaagtgtctttaagatcacatcttacataagcccacagtagctttttttttttctcctctgagtgagtcttgctctgtcgcccaggctggaagtgcagtggcacgatcttagttcactgcactctgcctcccaggtgcaagcgattctcctgcctcagcctcctgagtagctgggactacaggggtgtgccaccaggcctggctaatttttatatttttagtagagacagagttccaccatgttggccaggctggtcttgtattcctgacctcagatgacccacccacctcagcctctcaaagtgctgggattataggtgtgagccaccgagcccagccagttttcctttttttggagacagggtcctggttcttgctctgttgcccaggctggagtgcagtggcgcaatcttggctcactgcaacctctgcctcccaggctcaagcgattctcgtgcctcagcctcctgagtagctggaattacgggtgtgcaccaccacacctggctaatttttttatttttagtagagacggggttttgccacattaatcaggctggtctcaaactcctggcctcaagcaatccacccagctcggccttccaaagtgctaagattataggcatgagccactgtgcccgcggttgaaacaagagtctcattctgtcacccaggttggagtgcggtggcacgatcttggctcactgcaacctccacctcctgggttcaagcagttctcgtgcctctgcctcccgagtagctgggattataggcgcatgccaccatgcccagctaattttttgtatttttagtagagatagggtttcgccattgcccaggctggtctcaaactcctgagctcaagcaatccacttgcctcagcctcccaaaatgctaggattacaaccatgagccaccgcgccctgctttccttttcaatacaagaagtaaacattccccccaccaccactgagacttaccctttttaagcacctatcttcccttgccttgttgtttctaccaggaatcacaagtggctttaccacttcagttcttatactgctagtgacattgtccccatgccccacccttcaaagtggggagtttcatgacattatgttatgttttcttatctcaaattggtggacttttttggtggaaggagaatttcataaagttggagatcttggccttaaaatacagtggtcgggcactgtggcttacgcctgtaatcccaacactttggaaggctgaggtgggtggatcacctgaggtcaggagttcgagaccagcctggccaacatggtgaaaccctgtctctataaaaaatacaaaaattagctgggcatcgcagcatgtgccttgaacctggaaggtggaggtggaggcagaggtggaggttgcaatgagctgaagttgcaccactgcactccagcatgggcgacagagtgagactccgtctcaaaaaaagaaaaaaaaaaaacagtggtctattatgcaaacaagccctgtaacccacccctccagctttctgtctacagttaaggcagaaccactggaaatggatgggaagcctgccttaaccagaggcatggacagccaacaggtggatcgctcccaagatgctcagggcttatcttcatattcctcccatcctcattttttcactctgcattgactcagagtcatagctctgaaatttatcatttggtaggacacatgaaaatcatggtgttctttgaaatcttcatgtatttaatttcttcacatggaagttttatgaagaattgtactgaaactttgttatttcttggctacttttttgtcatccaagagacaagcagaagtaacatcttttttagaaacatagtttttagtgtatttagtgtttttaaagtatttttagaaatgtaaaaactgaggaaattctctccactgaaatttggggaggttgggaggtctgttaccattctggttttgctcagaacatgtcttctagttcacagatagcaagatttcaaaggagcatagtcaaaagcactagtctagttagagaaaaggacaaattcaggccttagctcttatctctgctgctttggcctatgacagggctgtcactccacagcctattgtggaatgggagcttttaaatgccaaggccattatggggctgggttttcctgccttcctggaacactggaaaagcccagtgcttctacagctttctgagcccccgagtgagaagcatagtggaatgaccctccactggctacagataccatcctggctctcccagattgtcatggtgtcagcccaggaaatgaatgttcagtaggcagggctgtggggagaagatattgctactgtgttctagccccaatgtccacccatgcctattgttttctctttcagcttcggcttcattaacgccagatttcttatctccaggaagttcaaatgtctcttctcccttaccttgttttggatcctcattccactctacaacttcctttgtcattagtgacatcaccgaggagacagaggtggaggtccctgagcttccatcagtccccctgctttgttctgccagccctgaatgttgcaaaccagaacacaaagctgcctgcagttcgtctgaagaggatgactgcgtctctttgtccaaggccagcagctttgcagacatgatgggtatcctgaaggactttcaccgaatgaaacagagtcaagatctgtaagtatctgatgaggagctctggtatctatttactcagagttgcccatggccaattatgtaatgcaacatacttacatagtaagttcttagtagtaccatatgttatgtcattcataaagcttgctgactacctgcttgccagtgcctggggccccagtttgaggaaagagcaacactacatttattgggtttggtcaccccaaccaaatatgaggctagtagggattttacaagaaggctcatctaatccaacttctgtcctcaggtggctttaccacttcagtcctcatactgctagtgacagtgtcttcatggcccacccttcaaagtgaggggttgcatgacattatgttttgttatgttttcttatctcaaattggtagacttttttggtgggaggagaatttcataaagttggagatttctgctttaaaatacagtggtccattgtgcaaacaaaccctgcacattcagtgatttgagaataaggcttttgagactcaccagtagttccgaaacctagctgcccatcagaattgctcagatttgttaaaaatacacctttaacttactaaagtagaaccccaaggagtggagctctaggtttttccgatggagtatgagggtctttggggaatacctaccttgaaaaacttcatctggcaaagaagcctcagggagtcaccccattgcatagtgtttctccagttgtgggttgcggtttcaacagctgcacaggactcaccagaggagcttggtttgaatgcaggttcctgggcatttgagagccagaccttgatggccagcacccagcttgtgcagctctgtttgttaatgcagatgaaaaactgttttggggacagggaagcgaggtcctctcctgagttgataaagttcttgttaaagggaaagttacttgccctggatccctttttgtctcctgggatccatttccctctgaaaagtagaccaggctaagtgactccctcattgcttcctggcagttgacccatttagggaagtcactcttaaccttccttcactggccctagtcaggttggtcatactcacccatatctctttggtcttccacattcccaaattcagttgctgctgtttttggtcttctctgagctgtcttcttctgaacaaaatgttttataggttgactctcaaactttctcttacttgccttttggaccaaattagattcaagacccttattgctagccccctcctcccacttgtgtcctcagatcagaaggagctgggtcagtgaataagaatgggaaagtaccccagtcagcaaaggttcagatatgtcaccaaccaaacgcagtccctcttgtttttgctttgaaggttgaatagtcagtcttggctcttatatttagcttaatcaccagtaaaacaccttcatgatgaatgtatataagttcactaggatttcaagcaactattttccaggtatctaggaccctcttatatgatgtatcagataacttgggcctacttcagtctggagttggttttgttcccatgagtttcttatgtgaatgttttgctctaattctggctctcataaaaaatcatctcccctgaaggggagacccggtggtaggaaatcccaagcacaccttttctccagaactatcaagggtcagaatagccaagagtcatcagtcacttcccctgctgaccctctggggaaatgctactaagaaaacagggccagaaggcagaagcttagccaccagaggccaactctaacagactgatggtcctttactttgcccatactttatagctatttcaggaaatagtaaagcattctagttaatagatgagatctggaaccagctagtttggttctgaactctggattcaccgcttacttgctgagtgactagtgaccttgggcaacttgtataacctttctgtgcttcaatttccttatctgtgaaagggaattgtaatggcacctacctcgtaagattgttgtgaggattcaacgagataatgtattcaaaagatatacagcactacacaggaaagagtaagtactcaagctattattgtgtctctaggaaccggagtttattgaaggaggaagaccctgctgtgcttatctctgaggtcctaaggaggaagtttgctctaaaggaagaagatatcagtagaaaaggaaattgacaaccctcagctctgcaaactcagtctcatgctcctggaataccttcaatagctgccttcctcaccgcagatgtttctgcctcttaaggatagatcttctgcaacagtcttgctgacaagctagagcttggactgaaagagaagagctggattatatatttcccagacttcaaaccctagcagaagctaaggcttgtgatttgacctgagacatttgtttcaggtaatcgtgtagaatgaagtatcttagtttaaagggtaagagagaagttgtttctggtttttccttgcccctgtgtgaaaataggtcctaaatgactgacttcactgcattagaccctatagctggtctcacaagacactttgtgcccagctgtcactcactcagcagcttccttgcagcagagcagggctgaggggaaggggctatgaatgtttgtatacatgttcacagggcacggaaaatcttatgctgctccgtcataaacctacaccaatgcccagcaatcaccctcctcacttccttgtctagatgtagaggtcaggctgctgaaccagccaacacatgggctactgctgggaagcctgggctgttttttttcttaaacacattttatattactgaacaaccaaatctaccctccacggccctgaggccttatcagttccactgattaaaaactttctcttccacggactttaagcccggtaggaaagagagaggaggagggggaaagagcaaaccatctttcttccaggcccttgactgctcctttgggctgggccaaggtttgtatgtaccacaccatgcatgactcagatgccctcaggtccctttctctatggtatgtatactgcttgtgtttgggttgaagcactacctgacattaaaggaaggacttggagagagaatgca

SEQ ID NO: 1202 - DNA, 1419 bp, Homo sapiens
gaacatttcaagtagcctccctctatgttcctttcctttttaaatatattgataatcctactgcagggaatttgggagccatacttggtcttcgcatgcaacgtaattagatataactatactatgtgaatatgactaaagaaatgaaaatgaaaacagtatcttgtgctctgtaacgattgttattaaatatatcatagaaatgagaagagtaggctcaggagctgaactgcctagttcaaaaggccaaatttactactttttgttccgtgaatttgttgtgctcctgtttccttagttgtaaaacagagataacaataggacgtgcccataagcttttcatgaggattaaatgagttaatgtgtttggtggggaccaggtggacatggtactggtagggccctatttgacattggctttaagtatcactggctttaagtgcatcagtagatatatgatgacaataattgtattatcatggtgatatggatttcttataaatacttgtattatgttagtcacttctagaaaagaatacatctatacagtagaatataattcaaaaaataatgtcatatttttgtaaagaaattttttgtaaaacttttcagtcttcaaagagtttcatagactttattccatttatattgagagcctactttgtgttaagcattttgctgaacattgtcctcactcttatgttacttaccatctattgggaagagaaagaagtaaacaaataattacatgtagagtagtagtgtcaatggtagaggcatgaacacaacacagatttaacactagagaaagagtgatcacaaaagaaatgatgtttcagttgagttttaaatggcagctggagttcatctgaatgattaggtgtctaggacaggtttaaaggttagggagtaaggaagataatattcaaaataaaaagaacctgaggatattcacagaggacatttgcagaggcctgaaatagcattggtacattcctagaaccataaatagtttgatggtaatgtaaattacagtatgttttgaaaaatcatggaagatttataccacgataagaaacttcaactttattctaaagttgatgagcatttgacagattttaagcaagaaacaaatattaaatttatattttagaaagaattctagatacataaaaagcacttattataatccagtatccattcatgataactctcagctaactggaaataaaagggaacttccttggtctaaggaagaacatctacataaattctacaaccagccacatacttaatggtgaaataatgaatgtttttctcctaagatcaggaaaaagaaaaagatgtctcctcttacttctattcaggatggtactggtagttcaggccagtacagctatgcaagaaaaagaaataaaa

SEQ ID NO: 1203 - DNA, 1419 bp, Homo sapiens
gaacatttcaagtagcctccctctatgttcctttcctttttaaatatattgataatcctactgcagggaatttgggagccatacttggtcttcgcatgcaacgtaattagatataactatactatgtgaatatgactaaagaaatgaaaatgaaaacagtatcttgtgctctgtaacgattgttattaaatatatcatagaaatgagaagagtaggctcaggagctgaactgcctagttcaaaaggccaaatttactactttttgttccgtgaatttgttgtgctcctgtttccttagttgtaaaacagagataacaataggacgtgcccataagcttttcatgaggattaaatgagttaatgtgtttggtggggaccaggtggacatggtactggtagggccctatttgacattggctttaagtatcactggttttaagtgcatcagtagatatatgatgacaataattgtattatcatggtgatatggatttcttataaatacttgtattatgttagtcacttctagaaaagaatacatctatacagtagaatataattcaaaaaataatgtcatatttttgtaaagaaattttttgtaaaacttttcagtcttcaaagagtttcatagactttattccatttatattgagagcctactttgtgttaagcattttgctgaacattgtcctcactcttatgttacttaccatctattgggaagagaaagaagtaaacaaataattacatgtagagtagtagtgtcaatggtagaggcatgaacacaacacagatttaacactagagaaagagtgatcacaaaagaaatgatgtttcagttgagttttaaatggcagctggagttcatctgaatgattaggtgtctaggacaggtttaaaggttagggagtaaggaagataatattcaaaataaaaagaacctgaggatattcacagaggacatttgcagaggcctgaaatagcattggtacattcctagaaccataaatagtttgatggtaatgtaaattacagtatgttttgaaaaatcatggaagatttataccacgataagaaacttcaactttattctaaagttgatgagcatttgacagattttaagcaagaaacaaatattaaatttatattttagaaagaattctagatacataaaaagcacttattataatccagtatccattcatgataactctcagctaactggaaataaaagggaacttccttggtctaaggaagaacatctacataaattctacaaccagccacatacttaatggtgaaataatgaatgtttttctcctaagatcaggaaaaagaaaaagatgtctcctcttacttctattcaggatggtactggtagttcaggccagtacagctatgcaagaaaaagaaataaaa

SEQ ID NO: 1204 - DNA, 560 bp, Homo sapiens
aagtagtctggcaggataattgtgttaaaattgatagcaaattagaatagatggaagcagttacatttagctgggacaaacatatacagtgtttagcaaaggcatatcaacctgaaaatacagacctacaatgaaaatgcatcaactctaattgctatagagttgttatggtagcactataattatagtatatgtgcaagtggtctggataaaaaaaattaggacaatcaaaatatttatactgttccgtagaggaacgggtatgacattgcagtaggcaactttgaattgcctattattgttgcctttacttttggttttgtttatatcagcaagggaaaattactaattctaaatttagtttagaaggaaaaagtatcaaatatttcatgattttgagtaaagaaacataactttcttaaaatggctgtattttaatttttattatatactttattcttttgtctaattgtagataaccaagacacaagttcattagctgatgctgtagagaaagttgcaaagcaacaacaatcacaagcatcagagatagaaaaaaa

SEQ ID NO: 1205 - DNA, 560 bp, Homo sapiens; identical to SEQ ID NO: 1204

SEQ ID NO: 1206 - DNA, 17570 bp, Homo sapiens
gcgcggcgcagagcggcagcaagatggcggcgcaacagcgggactgcgggggtgctgcgcagctggcggggccggcggcggaggctgaccccctaggacgcttcacgtgtcccgtgtgcttagaggtgtacgagaagccggtacaggtgccctgcggacacgtgtaagcggcgagcccgggcctggtcggggggcgcttaactgggaagggaatggagccgaggagcgagatgggtctcagggcgggagccagaggacccacccagaggggcctcccgggggtgtcccccggggctcctaagggccgtgaaagctgccggggcgctcttctgtcccgccccgctcactcctaagtatcccgttcctccgcccgtcttagcggggcagctgctgtctgttgagcgcctgcgatgttccaggcggcctgtcagtctccttcccacacgtgatagtggactcgtgccctgcggggactttaggctccgaagtccgcccttggagagccgacgtttcctttctagtccacgtcgctcttaaagcataggacatttggcgtcgtgtctagctgtggcgagttattctactgtgcactaaagtcgggagaaacgctgaactagactaaaacaacaaaagggaagtctttatggggatctggccagtttgcccttagctgtgaaaggggggtgggagttggcagatgggattgttagcattctacttcctgtgtaggaggtttgtttctttcagttttcaattaagccttcatgacctgaatattgtgaatagagtggttataatgattaaagcagatatgtgtataaatgtccagtccaggtcctgggctgtggccggggctttcgaggttggtcaggttggtcgatttgaatctaagccttgttccatcagacgcacaaacacatctgagttgaaagaattgtagacaacgtggccacctgcttcttgcctcagaattggcttttcctctggcccctctcagtgcttatcgtgggatcaccttggcattggtcttggcagcgggcacagtagccattgcactccatgggcattattctatagccaccctgcagcgggggagggttggcagccattttacaggtgaatacactgagggtccgaggctctcttagggaagggtcaccgtggcctagctcttcccagatgtactgcaggtgaccatttcagtagtccagagaacagtgcttggcacctagctggctgctttttgcttcatcatgttgctttaggctattcatctttgcaattcggttagcctggaactcttccccccacccctcccttttcaggcttcaagtcccaggttaagttacctcaccaaataccatccccatctaaattacttcccccacttcctttctgggacttaacttccttctccttgcttgcacagagcaaaacttaacagctcatgacggagtggccatatctttattgcccctgaactgactggaatggcctctgtgtgccagattttggggtagactctgccttcagagtttacagtccagtgaattgattataaataagtaccaatgactggtcaaactattgtaaaaattcattctgcaagtgggagggtatttcagggatcacacctctgtgcgtggggtgagtgatcaggtaatggttgaatgaactaataagtcgtgtaagcaagcttcacgagagttgaagtggtctttagctttttcattgaatccacttatccttggatcagatttacctgattttggattaattcagtggatttcatttactattaacatttgtaaaaaggctagacccagcacagtttgctaaatgaagagcagcaaaatttgagattttcttgagcttggtgaacctttcctaggtcagagggcaaggaacagtactggttttcaaaccttggctcttctctatcctcgctgtcctagccccacgtgatcagcagttcagtgcaaattgaagacagatggaagcacctctgtgagggcagcccaaatccccgctagctccaaccgactgctttctcctgtgcctagttgatttttaccttttgtgcttggaaagttgagcatcactgcaactctggctggggcattggatttttataaaactttatttcaagccctgaatgactgtgttctccaatctggtagaatacagctggagaaaggcagctggctgggtgcccaagagaagggaatttcttcctagcactgtgacggagtggagcatcggaaggctgaactagaaaagggcgcataagtaggaaatagaaactgaaaagccatcccaggatatttgagttgttcaaaagcaggctggtagtttgggcatgtctcaggcacaaagtgactcgtgaacatttgatagatgagctgtacctgtgtgtgtgcttgagaagagacttcgagctgcttttatctgcatgctgggtttggttccattatactcactggaccctctgtgctctcttgggttcctcttgtcatctgcctttgtgaacaggcaacacaagtgatggccacaggccctgcctgtctctactgcctcatcacttgcccttctcaccatggtctaccgcatcatggcccccaaggtctgcctgccttcctttccagtcctcatttgtgtgtggcgtgatcttggtgtggagctctgcacccagatctgtgtggctgtcctcgtaatcaggtcccacccagctcaaatgccaactcctcagaagcagctttctatgatcaccccagctggtctgtttgccatatttccttcatatttttaatcactatctgaaattaacatttgtgtttcccttcactctagaatgtaagcatcatgagaacagggctttgtcaagtttccattgccctcagtggtgaatgaatagactccctcaccttctctgtacctggtctggaattttgcctaacagcattaacatctaacttaatgacaaggaggaaggagattcttagaggcagtagaaaatggtcaagtgttcagaagatggcctttcattatatatctttagttctttctggcagatttggttatactgtcttaatctatcaggttgggtaagtagcccagggtgtcttctccattctttctgtatgccttatctcagcattaccatcttcctaggcttcaggataggaactcggtcatctttgacttcttttcttcaaagtcagtaagttatcaagtcctcctgattctacctttctgtgaatggtttcctgaattcatcccctgctgcttcagtcagaccctcacaatcctctgcctttagccatctgtttggtttctactttgtctcttctcaccttctcacctaaaaaaaaaaaaaactatagggctgggctcagtggctcacacctgtaatcccagcactttgggaggccaagacgggtggatcaccagaggtcaggagttcgagaccagcctggctaacgtggtgaaaccccgtctctactaaaaatataaaattagctgggtgtggtcatgcgcgcctgtaaccccagccacttgggagtctgaagcaggagaatcgcttggaccggggaggcagattttgcagtgagccgagattgcaccattgcacttcagcctgggcaacagagcacgactctgtctcaaaaaaaaaaaaaaaaaaaaaagtaacaaaactttgttttccatgatagcacagagatatttttctgaaacctggatttggccttgttttgttaataccttccttttaaactcctggctccctactgtttatgaggaaaagtctgttagatttttatttcctcagatacatatcaattttaagcctaaattaggcctagaatagtcttcccttcctctgctagctgacctctttttttaaaatgccagaggggtaatgggccaacatctgtaacaaggttcgagggtggcacatctcacacatgcacatgaacacccagtcctcaggttcatgaactacaaaaggatccatctgaacccttttttttttttttttgagacggagtctcgctctgtctcccaggctggatggagtgcagtggcgcgatcttggctcactgcaagctctgcgtcctgggttcatgccattctcctgcctaagcctcccgagtagctgggactacaggcacccgccaccactcccagctaatttttgtatttttagtagagacggggtttcactgtgttagccaggatggtctcgatctcctgaccttgtgatctgcccgcctcggcctcccaaagtgctgggattacaggcatgagccaccgcgcctggctgagctgaacccttttaaggctgatcagagatgccgtctctgcagtcttcccctccaccccccccttgagacagagtcgcactctgttgcccaggctggagtgtgcagccacctctgcctcccaggttcaagcaattctcctgcctcagcctcccgagtagctgggattacaggcatctgccaccatgcctggctaattttggtatttttagtagagacgggtttcaccatgttggtaaggctggtctcaaactcctgacctcgtgatctgcctgccttggcctcccaaagtgctgggattacgggcgtgagccaccgctcccagccttcactgcagtcttaccagccctttccttctcaggtcactagttgattttccctttatgttcctgtagcgctttgccttcacctgtaatgatagcagctcccgtttgtggtgcgttttgtaagggctggacactctgccaggggtctgctatacaaactgtatcctcccagcagtcctagaggtaggtactactctctccatttcacaaaggaaaaaatggagattcaagaaaccccactgagatccttcagtggcagggcctaaggcttgaagcctcaaccttaacaccttcactgtgtctatcacaggagtttgcatttgtttctgtagttgtgtgttctttgtagtccactcctatccctcattttttctggcttggaaggacttagtatttgaactgggaggagagagcaagttgttttttactccattatccattgatgtctttttaaaagttgatccatatttgtcgtcttgtctccatgatgcgtgacagaggttctctgtatgtcttgttctagcttttgctctgcatgcctgcaggaatgtctgaagccgaagaagcctgtctgtggggtgtgtcgcagcgctctggcacctggcgtccgagccgtggagctcgagcggcagatcgagagcacagagacttcttgccatggctgccgtaagaatgtatgtggaagtgatgtggaagagtccatgtctttccatgataagttggggtaaaacgtacagctgccatgttgttgctgaagttagagcatgactaggtcactaacagcacgcgtgcatgccaattacctgtggtgatggctgggctggtttgttttcataaccttactggtttttgtttctttttttaagagttggttaagtatatattttaggtttgaaagccatagaaatcagttatcccagttttttcctataaaagatcaattatggccaggcgcggtggctcattcctgtaaccccagctctttgggagtccgaggcaagagcttgaggctaggagttaagagaccagcctggacaacatagtgagacctcatctttacaaaaaaataaaattagccgggtgtggtggtatgtacctgtaggcccagctactcaggaggcagaggccagaggatcacttgagcccaggagtttgggattacagtgatctatgatcatgccactgcactccagcctggctgacagcaagaccctgtctcttaaaaaaaagtcaatatgaaatcattggattgtaataacaatagctaacatttgaaatgcatccatgctcttgtataatcagagtcaagtatatttattttcatacctgttataactgctactggaaaggagaaatactgttgtcttattttccaagagatatacacagccttgttgattttagaatcattaaaatttttaaaattgcagaccatacaaaagtacacaataatgtaggcttgttcctcattccagagattacttcaaaattcgttcaacttaaggcctggcaaggtggttcatgcctgtaatcccaacactttgggaggccaaggtgggtggattgcttgagtccaggagttctagaccagcctggacaacatggtgaaacctcggctctactgaaaatacaaaaaactagcagggcatggtggtgtgtgcccgtagtctcaactgttcgggaggctgaggtgagaggatggcttgagcccaggaggcagaggttgcagtgagctgagttcgtgccactgcactccatcctgggtgatagagccggaccctgtctcaaggaaaaaaaaagtgatttaatttcgaaagctgcataacattttctgccctttgacaaacactgtagaatttttaccaaccaagttgtaggatttttgcaaaatgagattatactataatatatatatttcttcaacttttttcacttttttaaatgtacactcattcccaactttttttttccacttttcaggttttttttctcttacatattggacagccttgcatgtcagtttcattatttttaacacttcggtatggatgcccatagtaagaatataccttaccatctccttttcagcgtgatttagtattagggatgcatagtagggccatttcaatgctgaatagggctattttctgtgtcttaattgggggcttcactcttgaggctgggcatggtggctcatgcctatatcctatcatttggagaggccaaggcaagaggatcactgaccccaggagttcgaaatcagcctgggcaacatagtgggactctgtatataccaaaacaaaccaacaaacaaaaccagctgtgtgtagtggtgtatgcatgtagtcccagctccttgggaggctgaggtgggaagattgcttgagcccagaagtttgagagcagcctggggaatatagtggacccagtttctacaaaaaaaggaaaaaaaaattgaggattcctcagtttgtagcttaaagtcaagttcttgagctggaggtgagacaatcatcatggtaagctggagctcaaatattggagcatttttttccccctttgaagtttacttttagaaactcaaaatattgaaatacaattccctactgtcttctttttttttttttttttttttttttgagacggagtctcactctgttgcccaggctggagtacagtggcgtgatctcagctcactgcaggctccgcctgttgggttcacgccattctcctgcctcagcctcctgagtagctgggactacaggtgcccatcaccacgcccagctatatatatatacacacacacacacacacacacacatacatacacacagagatatatatatatatatatatatatatttgtatttttagtagagacagggtttcactgtgttagccaggatggtctcgatctcctgacctcgtgacccgcccgcctcagcctcccaaaatgctgggattataggcatgagccattgcacccggtctcttcatctttatttatgcatgcataatgtggtttttggttttgttttgttttttttctgagacagggtctggctttgttgcccgggctggagtgcaattgcgtggtctcagctcactgaaacctctgcctcccaggctcaaaccatcctcccacctcagcctctcaagtagctgggactacaggcatgtgtcaccacgcctgcctaatttttttgtattttcagtagagacgagttttgcatgttgcccatgctgatctcgaactcgggagcgtgaagtgatggcccacctcagcctccctcaggattacaggtgtgagccaccgtactccgcccatgatgggctttttgtttgttttactgtatgcttttgcttttctccattttcaagattagtgattgtactgttggcatgcctcagaaaatgtttttctttcctttatcttccctcttttcttcaattcttaaaactttctttctttttagaaaacctgtaatgaagcactattctctgggttttcttctctttctgttttactgttgcacagcctagattttatatgaaaggctgggccgggcgtggtagctcacgcctgtaaacccagcactttggcaggctgaggcaggcagatcacttgaggtcaggagttcgagaccagcctggctaacgtggtgaaactccatctctactaaaaatatgaaaattagctgggcctgatggcacacacctgtaatcccagctactcaggaggctgaggtgggagaatcacttgaacccgggaggcggaggttgcagtgagccgagatggtgccactgcacttcagtctgggcgacagagtgagtgagactctgtctcaaaaaaaaaaaaaaagagaatttagattttaaagattatttctcagaggctggtgatagatactttaaccagggttagtggcttttatatgttttacctaaaggatcacttttctctgctgcacataacagaatgtggtttttggcttgctgtaaggagactagtttaaatgctagtatagaaaacttttaaaaacatcctagatttggagcttgtctgtgagcagacagcctatcatgaataggagcaaacctctaggagagttattttagagtggaagtggatatcctgatttagtcgaataaaatagcagccttggtattaatgggaaatctgcaataatcagggtttcagccccatcagcgtagtcaggagtttggtgagattatttgccagggtggtgtaggtctagttttctttgtgcccttgtttgggactatattttgcctgttgcaaggtcctcactaacttatgggctctgattcttcctatttgagttcttcctgtccaagatccggtcccacgtggctacttgttccaaataccagaattacatcatggaaggtgtgaaggccaccattaaggatgcatctcttcagccaaggtaaatgactcagtctccccttaggtggaggtcatctcttgctattaatacaaagaggttgcatgcccaggggtttagttgtatgaattgttatgctggctaaagctgatacaagtattttgggaggagtatgcaagggaggactctggtgttcacttcagatgttagctgagctatattctttttttcttttttgagacagagtctcgctctgttgcccaggctggtgtgcagtggtgcaatctcagctcactgcaacctctgcctcccgggttcaagcgattctcctgcctcaacctcccaagtagctgggattacaggcacctgccaccatgcctggctaaattttgtattttttagtagagacagggtttgtcatgttggtcaggctggtcttgaactcctgatctcaggtgatccgcctgctttggcctcccaaagtgctgcgattacaggcgtaaaccaccacgcccggccagctgagctgttattttcacaacacttgacctgagtctgaagtgatcatcagcatccttatcattacacatttggtgagctttgctcctttttggagtgtactgtggttgaagtttaatggaaaggtactcacagaaaagttttcttttttcctgtgtttcaccttccaggaatgttccaaaccgttacacctttccttgtccttactgtcctgagaagaactttgatcaggaaggacttgtggaacactgcaaattattccatagcacggataccaaatctgtggtgagtaacctttttttttttttttaaacttcattaagggaaaggatcaagcttggagaaaaatgacgggattagtagaatgaactcctgtgtgcccttcacctagattgacagattgttaacattttaccatatttgcttaaccatgctctatagtacacattttttgctgaccacttgggaataagctacagataccatgaccatttttgcaccctgaatacttcgcaccctgatacaggagtgtgtatgtcttaagaacaagaatgttttcttggaaaattatatttttgtgtgtataattaatcatattcaagaaatttaacattgattcaatctaatgtctaatgtgaaattcatgttttaattttaacaattgtaatgtctttcatagcaatttccccctccccccaaggcagaggcagggatggtacacgagttctctgtcctctgggtgctacattaagtcatgtgatgtctgttgttggtaacattaacttggttcccttggtgtccaccaaatttctccatgaagctgccattttatttttggaagtagcttcttcatagttgtggggaaagaggatttaggtgaaattattaggaaaaggcttatcaatccttggacattttactcagatattacctactggcatgtgtagtctcctttaaaaaaaaaaaaatgtaggctgggcacggtggctcacacctgtaatcccagcactttgggaggccaaggcgggtggatcagttgaggtcaggagttcaagatcagcctggctaacatggtgaaaccccatctctactaaaaatacaaaaattagccaggcatggtggcgggcgcctttaatcccagctacttgggaggctgaggcatgagaattgcttgaacctgggaggcagaagttgcagtgaactgagatcctgccactgcactctagtctgggcagcagaacaaaactgcccccccccccccccccccccccaaaaaagtatttgttccatcttagcaatgtgttacctttctctctcaatgtgattgacagaccaggtctttttttatagttaggtgtatacttcctctatagttttaatttttccatttatctcatactgcttctcttgaactacatactctgttgtatgggcagccttcagctccattgctgtaaacagtggtgcagaaattttagaattttaatgagcttttgtgagagtactagggcagctatcaatgctcatcttaagatggaactggccattttgagaaacatatctttgcctgtatctatgtatgtttataagctaaagtcttagatacagattgacttggttaaatgttacttgcactcataattttgttggatactgttattgctgaacttttctggtatggcagcctaattttctgtctttttcccctcctttggcttctgaaatccctctgattatgttgtctatgttgaggccttctcttcagcctttggccctctgttctgtcttcctctccctctgcaagttttttttttttttttttttttttttttttttttttttttgaggcggagtttcgctctgtcgcccaggctggagtgcagtggcgcgatctcgactcactgcaagctccgcctcccgggttcacgccattctcctgcctcagcctcccgtgtagctgggactacaggtgcgcgccaccatgcccggctaatttttgtatttatggtagagacggggtttcaccgtgttagccaggatggtctcgatctcctgacctcgtgatccgcccgtctcggcctcccaaagtgctgggattacaggcgtgagccaccgcgcccggccctctgcaagttcttaactctgcgtttctcccttccctttagaagccatctccttttcagtctctagtcccaccctatgttctagctccccagctacagctgcctgcccaccttttccactcagtcttctaccattccagatttctctcttgtcaatcccctttatcactgtatcttccttgctgtggggtagggttccacctttaagtgggggcacttaggtcttctctctccctggcatgagttttctgcactcactggtctggttgtttacatgtgttgacagtaactgccgccttctggccttttctccgtgctgctgcctctcttctggagcacaatttttttttttttttttttaagacagagtctcactctgtcacccaggctggaggctggagtgcagtggcacaatcttggctcactgcaacctccacttccagggttcaagcgattctcatgcctcagcctctcaggtagctgggactacaggcgtgtgccaccatgcaaggctaatttttgtatttttagtagagaagatgtttcactatgttggccaggctggtctcaaactcctgacctcaggtgatctaccgctttggcctcccaaagtgctgggattacaagtgtgagccactgtgcccggcctggagcactctttcatgtcctctttgcctttccaaatacttcccaatcttcaaaaaccaaatcaaccttttgtgtgagggcttttcagcctgatccccctcttctgagcatttcctttgttaagatgcatgtaaggctgtgttttacttccctgggacattgctcatcggcttattttcttagttttcctcatgcttttggattgtcttgtgtgctggattggaaggccagtctaggccccccaccaggctgactcacttctctgcttacagtagggaatgagaaagggtggtatcatgatttgaactttacccagtcccacgtgtcatttgacttgagctggaaatttgcagtgtttttttgggctgctgatgtgcacaggaaggagttactggccctggacagtatgtcaggaaagctgtcctggaagaaaggaggccagacacaggccacagagggctggtgcaagcttggaaattgggtgcctaagaccttgcttttgtgttgaaaggtttgtccgatatgtgcctcgatgccctggggagaccccaactaccgcagcgccaacttcagagagcacatccagcgccggcaccggttttcttatgacacttttgtggtaagtctggagcctgggctctgatccctcccctgggggagtggcacggctacttcactcttctcaaaaggggaaatggggatccccagtgttgaactttgtcgctgttgtgatgggcttccagtctgtatactggatacagtgataaaggggattgacaagagagaaaagaagactgagtggaagaggcgggcaggcagctgtagctggggagctagatgggcttccagtctgtatactgtagctactatacagtttctattcatgggccaggcaggtggccagagtgacatttatttacttacatgagatggagtcttgctctgtcgcccaggctggaatgcagtggcgtgatctcagctcactgcagcctccacctcccgggttcaagtgattctcctgcctcagcctcctgagtagctgggactacaggcgcatgccaccatgccccattactttttgtactttcagtagagacaggctttcactatgttggccaggctggtctcgaactcctgacctcgtgatctgcccaccttggcctcccaaagtgttgggattacaggcgtgagccaccacgcccggcccagagtgacatttaagaagatgatctgggctgggcgcagtggctcacacctgtaatcccagcactttgggaggccgaggtgggcggatcctgaggtcgggggttcgagaccagcctagccaacatagtgaaatcccgtctttactaaaaatacaaaaaaattagccaggtgtggtggtgggcacctgtaatcctagctacttgggaggctgaggcaggagaatcgcttgaacctgggaggcaaggttgcagtgagccaatatcgtgccactgcactccagcctgggcaacagagcaagactgtctcaaaacaaacaagaagatgatctggtcagtctttgagacagagacagtgatacttgctctttccatctcctagccctgccaccaaatttttgtctacttttcttgtggtttatataatttctgcctgttatagaacttggtttggggacaggtgcggtgcagtggttcatacctacaatcctagcatttttgggaggctgaggcaggtggatcgcttgagctcaggagttcgagaccagcctgggcaacatgggaaaaccttgtctctgcaaaaaatacaaaaagtaaccaggtgtggtggctcctacctgtagtcctagctactttgagggagctgggacaggaggatctcttgagcccaagagacggaggttgcagcaagctgagatcatgccactgcactccagcctgggcaacagaatgagaccctgtctcaaaaaaaaaaaaaaaaaacaaaacacacacacacaacaacaatttggacttgggaggctcaatctcgcatgtccatggggaccataattgaaatgatcctcctgaggatttccaagccaggtggtgcctgactcgttatgctgccatcaccttgttttcctatggaaatgcaggcgcagcattgcctagcttctccaccccccatgcccaagcaggacaggaaaatttcacaggaggtttcacaggttttaattatcttcaaaaatacttcaggtcaaatagcatatatccactagccaaatacggctgtcaggtttatattctttccctagagctggatggtttcaaaggggcacactgttgtcttgccattatagtagtaggtaactttggccaactatatcaagtaaacctcttacttacatatatagatgtcaagttaggattttagagtggtattcggtcttgatggctgaatttcagtatctaagaaagaaagctctctgctaaattgtcataaagaatattttttctcagtctgacagtgtctgaaactcagacttcagaataactgccctttttgttaatgtgacacagatgaattacattcatctgtgtcacattaacaaaaatgactcattaaaaatgagtcctaaaaatgactcattaaagagggctagttgcgctatagtttctgctgtattgtatggctctaaaaatctgattctgtactgtgcactgattccacctctcagaaacaactcttcagctcagtgcatctgcgtgctctgttccgacagacttacaaatgttctgagcacttggtctgtgccagcctccattcgtgtgctgtctgggtttctcaatctccatttaagggaggcatccttaacttcatttaagaatcaggcagcagactgggtgcagtggctcatgcctgtaatctcagcactttgggaggccaaggcgggtggatcacgaggtcaagagattgagaccatcctggccaacatggtgaaaccctgtctctactaaaaacataaaaattagctgggcatggtggcgcacgcctgttagtcccagctactcgggaggctgaggcaggagaatcacttgaacctgggaggcagaggttgcagtgagccaagactgtgccactgcactccagcctggcaacagagcgagactccatcaaataaaaaaaaagagaaggcagcagagacagattaattttcccaaagttacatacctagcatcacaaacagttgcactggggatccggtccctggcaacctgctccggatccagttgctaggctgtcctgcttctactgaaagccagtctttgcatctagaaacagttgctgaggctgcatgtctctttttgcccttaggattatgatgttgatgaagaggacatgatgaatcaggtgttgcagcgctccatcatcgaccagtgagcagagtccgtgcttgctatctgtctcatgttacagagcttccattacatattaaacgtgaaatctatgactcctgtaccttacctgttcaacagacctgaaaatgagccatggcattgggacagggtcacttctgacaggggaagtgggtccccaggtcagcccttctcttccctttgggctcttgccaaagctgtcttcccctactgttaaccttgtttgtcacacggtcgagttcgtattggttctcggctacttcctggagcttctgccgcctcctgtggaagataatctagcttctccacctcttgtttcacactcattcctcccatccagtgtttgtctctcgggtccttcaagccagccaggaccttttctgggtcatgaatagcacaatgaagcaagtgtctcctttccttgtccccaaggtgtgcagactttggcagccgtgcacctgaccagagctgaagctcccgctgggctgtggggttgccagaagctggggttgccatcccggggtacatgtcaccagtcctcttggggttttgtaccatctgatgctggaagttttgattagtgatattttctactactacatatttagagttcactggttcagtcttaaatgcctgcatggtgcctttttaggataaggtataaccatacatttttggtggaagtgtttctgggttagggaagttaaagtctgtttatccgtaagtggggaggagggtcagctaagagaagtgggagggccagagctttttggttctgatttacaaattaatgaagtagtttcaaacaacgcggtcatgtttacctctccatttgggagcctgcctacattcttgttctagaagcacaaaaaatcctcagatgaattagaagaaagaggtttggggactcagcggatactagttcttttaccttctgcttggtaacttagattaaactgagcattgtttttctgtcacaaatgttttccttatgacactggtttcgacatgtaaaatgtgtttgaaaacctgctttgtagatgcagagagaagctataggaaacccagtaccacccctggtctgttctgacgagacatcgttcataaggcacagcacatcgcaagatgaacagttgttaataaaagctgttgctggaaacttgctttaggaacagctcaagaaccttggagttcatatttcacaaatattaataaatataagtccaagagctgtcagcctaatctgtaggagcagaacctctgattgaccaaaaggcatatgggtttaggttggttttttgatgtcatatgtctctgatggggctgcaagtgctacctcgcgcttgtacactgctgctgtggggctccgcgcctgccggtgaagagctgcagatgccgagaagccagcaaacacagggcccactggaaaaaaatagttttttcattagtatttctcgggaggacccaaaagttaaggtcagcttgttcactgtaatttctggaagaagttcactcagaccttcctgaattcagatcatctcagaagtctggagggaaatctggcgaaaccttcgtttgagggactgatgtgagtgtatgtccacctcactggtggcaccgagaaacttacttccttgtattaagtgcacttcttgtatttctaataagatgactttccagaaagtgagatttgttatgttctggcttttaaaaggtaaaatataaataaatttcataacttaatctaagtggtaagctatggttcttgttttcattcaacacatttgccatagcatgggcttggggagtctccagaagatgg

SEQ ID NO: 1207 - DNA, 182 bp, Homo sapiens
gcgctgtcgcccagactggagtgcagtggcaagatcttggctcactgcaagctccgcctcccaggttcaagccattctcctgcctcagcctcccgagtagctgggactacaggcgcccgccaccacgcccggctaattttttgtatttttagtagagacagggtttcaccgtgttagccagg

SEQ ID NO: 1208 - DNA, 113 bp, Homo sapiens
ggagttcaagaccagcctgaccaacatggagaaaccccatctctactaaaaatacaaaattagccaggcgtggtggtgcatgcctgtaatcccagcgactctggaggctgagg

SEQ ID NO: 1209 - DNA, 7057 bp, Homo sapiens
gtcaaatgatttcagttcgtgaagccaaagccattccaaggcctgatggtattgaatggagaaataaatacatctgtgtagaaggtagttttctgtttaccatctacgtatcatcatggtactaagagaattacttgagtaatttcagctgtgtttcagttaaaagtaatacatttatgtctgaagtgatttgtaagtcttttagtttaaaatttttaattttaaaaagtcatttaaaattttttaggtatgagaaataataaacataaactttaggcattcaccctttctagttggtaagattcgagctgtctttatccctcttacttgtggttgatggataatttcatgacttacagatggaagaaaatagaatctttatatgtgattcttatattgacataaaatgagttatattcttttatacttaaaatattagtgcaagttggacttttattaatagaaattgatgttgctttaaaaattaaatgatctgaagaaattttcttctctaaaattaatttacatgtagttgaatatatccttgagacactttgagtgagtagaaaactgacttcaagggacaaaattattctcatagatgctaaattgaaggcctttgtaaatctggaggttaaaaagtataaatagttgagaatcagcatttgtagaaaacatcagattttggatgttttaatcttgaattatatgcagtattttaagagtttgtgaatatgaaattaaatctcctgctttggtgtgctaataaatggcactgggtgggcattattttagttacttgtgttcagttgaatactaaaccctgttctaaagtgctatgatgatgcaattcagtataatttggcatatgaccttattctgttaaggaaaagaaccccacgatactgtgatggtaaactgctttttaacatagcctttctaagcactaaaaaataagcaagaggagtatttaaaattatgggcctgtgtagattatatgacaaatctaaaagttttgacctttccatcagactccctattcttccgtactttttctaggtctttcccctcggttacctttcctcttaccaacaacttcattctttctgcctccagtctttcgctttcagctttaagacatacataggtcttctcattcttgaaaaatactctttatttggtcctactggttcttctgtgcatttttcctcctttttccatgctaaaattcttaatttctagtaatgtttacctactgctggcattatttaagacatttcatctcattcctgatgcctttagttatccttgtcttctcattattatcttcagtttcctcgtactcttctggtttcttcctgtctctctatatggattcttcacttttgtgggtgaaaggtgagtgggatggtggtgtgaacatggaaagtatatatattggagacacacatacataaaaactgttcctttgtttttttcctgtcttctgtttgcttttctctttttctgttttctttttctgccaaatttctcatgcaagttacttcttttttcttttctttgattttttttttttttttttttttttttttgagatggagtctctctctttcgccaggctggagtgcagtggcgtgatctcggctcactgcaacctctacctcccaggttcaagtgattcccctgcctcagcctcccgagtagctgggactacaggcgcgcaccaccatgcccagctaatttttgtatttttagtagaggtggggtttcaccatgttggccaggatggtctcgatctcttgaccttgtgatccacccacctcaggctcccaaagtgctgggattacaggcgtgagccactgtgtctggccagacttcactgtatctttttctaaaccatccacttgggccataactccctgcattgtcttccattttctccagtattgaacctctaccttcaaaggacaaatcagcttttaagttaaaattaaagttacctttctgtgatatttaacattaactgcctctcttcgatataatgctttcttctttttgatgactttttattattttcctaagggtaggtctttgaccctctgtaatttttcagaaaccttatccacatttatgatttagacttaacacacctatgctgatgactttcatttttgatcaccctctcccttgaattctatctaccttattaggcagttcatagtatatcaagcttttctgtatacataaatctaataaagatattaggctgacccatctgaaattgcaatttttgtaggttaaaaactgttaacatattgacagtatcaaacctaaaaaagaaactgtagctctcattttaataatttttcctttacatttgcatttaacattgcagaaccttttgatggaacaaatacagccagagcagtgcacgaaaagcagaaatttgatatgatcaaggatcaatttttaaaggtaaacaatgcattagatcaaccctagaaacattagtagactagtatgctttaaacaggaaaaaatacgtgtgtagtaggacagaatggtttctcttctgtgaatccattaatatagcatgatagagaacttattatttgaatttagttaaacttttccttcaaagagatctggctctgtttttattcacattgctttcactttcatagaaataagcattttctcttttctttttgagacggagtttcactcttgttgcccaggctggagtgtagtggcacagtctcagctcactgcatccttcacctcccaggttcaagggattctcctgcctcagcctcccagatagcttggattacagacgagtgccaccacacccagctaatttttttttttttttttttgtagagacagggtttcaccatgttggtcaggctggtctcaaactcctgacttcaggtgattcacccccgtcttcctcccaaagtgctggtattacaggcatgagccaccatgccctaccgaaataagcattttcgtagtgagcttattaaatttccaaaataagtgaataaaacctaatggactcttttccttccttagtgtattggggaatttattgtggccttagaaggaagctgatgtctgatccatgctttttctaatgtataccccactgtcacaggaattagagtgctgttttatctttgtttatatttaggaaagttaaaatttatgtatatgtctgtgtttatagtatgaatttattcatcagtgatgttgctagatgtggtcttaatcttcagggacttcacaacacattgtagaaatgccttgatatatgtattgagacatggaggggagggaaagctttgtagaagaaaaagatgagagaaccgcaaagatcattttagaggcatactttttcattatctagacattcaagtggactttattttaatgataatttaaaatgcaagtattgaggcatgagtatcactggaaccaggagttcgaggctgcagtgggctattatcaagttgctgcacttcaagcctagacaacagagtgagagactccacctctaaaaaaaaaatgaataaaaataatggccaggtgcaatggttcacacctgtaatccaaacactttgtgaggccaaggcaggaggattgcttgaggccaggagtttaagaccagcctgggcaacgcatagcaagacatagttcacacacacacatgcacgcacatgctcacacacacacacacacacacacacacaccccacctcacctcaccccacccctgggtgtagtggtatgcacctgtgtcttagctactggggaggctgagtggagagaaaagccttgagcccaggaggttgagggtgcagtgagctgtgattgtgccaccgcactccagcctgagcatgagtaatagagtgataccttgtttcaaataaataaataaatagataaaatataagtattctattacaagctgtcgttcaaatgagactttcttaatttggcaaccagaatagaaaatttgtcttatagaaattctttaattttggccgggcgcggtggctcacgcctgtaatcccagcactttgggaggccgaggcgggcggatcacgaggtcaggagatcgagaccatcccggctaaaacggtgaaaccccgtttctactaaaaaaaaaatacaaaaaattagccgggtgtagtggcgggcgcctgtagtcccagctacttgggaggctgagggaggcaggagaatggcgtgaacccgggaggcggagcttgcagtgagccgagatcccgccactgcactccagcctgggcgacagagcgagactccgtctcaaaaaaaaaaaaaaaaaaaaaaaaaaaaagaaattctttaattttaaaacaaatattcaagagagaatatttttgtttatcagattaaattgagaactcaaaattagcaatgctacattggtgttcttattgatgagtgagctttcatttaggattgtttagttgtaaaaccaatacttttagacaatcgaataactgacatgagactagaatacaaagatctgcagtcaccaagtagtgagacagatttttagcttgtgaacaagtttcttttcttctccttatcaattcaaatcaccatttgaattttccagaggcatacataaagtgccttattgtaaatttactctctccttcataaatactatatatttttttgagacagggtcttgctctgttacccagactcaggcagcctcaatctcctgcgctcaatgatcctcccacctcagcctcctgagtgctgggactataggcgtgtgccaccatacccagccaatttttgtattttttgtacagacagggtttcaccatgttgcccaggctggccttcagctcctgagctcaagtgatctgcccacctcagcctcccagaattctggaattataggcatgagacactatacccagtctcataattattgtttttaatgcaaaaagctagtaaagatgtaagacagtcaatcaaataattgaaataatcctctcttctcaaatccaaaggttttgtcttaattaccttgctacttttagattgaattaatccgtgaataaatattaatattgtcagttgtatctttcagtaccacctatgtgcccatttctttattaatgaattggaaccataaaaatatggagtttttaaataacattttcttttctgatgacagaaacaatacttacactgtgttaaaaacttggaaaataaaaacttagccagcctgggcaatacaatgagaccttgtctctacaaaaaaatttaaaaatagctgagcgtgatggcatacgcctgtagtcccagctactcaggaggcagaggtgggaggatctcttgagcctggaaagcggaggttgtagtgagccgagattgcaccactgcactccagcttgggtggcagagtgagaccttatctcaaaaaaagaaaaaatttgaaggaaaaaattattcaaaatttatcacctagagagaaccaactattaacattcttttaaactctcagtcttttgttctgcataaattttaggttttaagaatgatttttctttctctcccagtcatggcacagattgaaaaacaagagagatttgaacagtatactacctgtaagagctgctgtcctgaaaagataactggcctctatttcttaataaattcttccaagaaataaagaacaatagtttcatcataatacattatgtttacctccatcatagttgcttttttcatagttcttgttttcatgttttatttttaaaaagacatataaagattgcatattttattatgacatttcctaataaacccctttgatttaaaaatgtatttttaaaaatgtttacattgatgatgagtaatattgcatgtgttttcaggtgatcagataaaatatattttgggaaattaactgaacaaataaaaagtttttgatataacttcaattaattgtaccacatgctaatcctgaagagatgtgtagaattttggaaagggtctaattcatacatgcttaaagtataacctacgttagatagtttgttgtcaaagtctgttctagtaaagtgaagattcaagtcagttgttcagttacttgaagcaaaacgaaatctttcatttcagtcaaatcactgcagtcatgaaatactgaacaattgccttaagtctttgcttgactcactgggatagactgaggctttgggtgtgtctgtattagcatttcattagtacttcacatgcttttgatgtactcttgagattgctttaaattttgtattgaaacaacaatacattttgcactgtagtaatgggagcactaactcttacaacagttagtgaatcgttttaaagaatcagttcagtgtagacattttgaaaagattgtttcctgtgctttacgatagcttagtgcaatgtgcacttctgttttacttgccattttcctgctctgttttctctgtgacatgaagcaacagaaactgagatcaaagttaagattatatcctgtttgtagtatcagatatttttctgtgtacaattataggattgtaatctaaactggaatttttaggcagtaagtcaccacaaaatgttttagataagacacaataaaattattataaataaaagcttaatgtttgtaaaaaatctcttttttagtatttcttttttcacatgaaagaagtggtggctgctaaaaaaaaagctacagtgtttattaagggtctttttgatttatgtaaatatttgtaaattggtcagtgcctgtaaatttaaatataaaaagtaaccttgaaaacagttttaactttttcaaaagaactatgtccaacattttttagacctgctgtagtacagttttgtacctctaacgtattttttttttgcagaccaaatgctaaaacttttgcttttctttgacttgtaaaaggtgcacattttcattttcttccttaagttcaaatttttgtatgatgtcaaatgcaataaaatttatatatggaca

SEQ ID NO: 1210 - DNA, 4682 bp, Homo sapiens
catttaacattgcagaaccttttgatggaacaaatacagccagagcagtgcacgaaaagcagaaatttgatatgatcaaggatcaatttttaaaggtaaacaatgcattagatcaaccctagaaacattagtagactagtatgctttaaacaggaaaaaatacgtgtgtagtaggacagaatggtttctcttctgtgaatccattaatatagcatgatagagaacttattatttgaatttagttaaacttttccttcaaagagatctggctctgtttttattcacattgctttcactttcatagaaataagcattttctcttttctttttgagacggagtttcactcttgttgcccaggctggagtgtagtggcacagtctcagctcactgcatccttcacctcccaggttcaagggattctcctgcctcagcctcccagatagcttggattacagacgagtgccaccacacccagctaatttttttttttttttttttgtagagacagggtttcaccatgttggtcaggctggtctcaaactcctgacttcaggtgattcacccccgtcttcctcccaaagtgctggtattacaggcatgagccaccatgccctaccgaaataagcattttcgtagtgagcttattaaatttccaaaataagtgaataaaacctaatggactcttttccttccttagtgtattggggaatttattgtggccttagaaggaagctgatgtctgatccatgctttttctaatgtataccccactgtcacaggaattagagtgctgttttatctttgtttatatttaggaaagttaaaatttatgtatatgtctgtgtttatagtatgaatttattcatcagtgatgttgctagatgtggtcttaatcttcagggacttcacaacacattgtagaaatgccttgatatatgtattgagacatggaggggagggaaagctttgtagaagaaaaagatgagagaaccgcaaagatcattttagaggcatactttttcattatctagacattcaagtggactttattttaatgataatttaaaatgcaagtattgaggcatgagtatcactggaaccaggagttcgaggctgcagtgggctattatcaagttgctgcacttcaagcctagacaacagagtgagagactccacctctaaaaaaaaaatgaataaaaataatggccaggtgcaatggttcacacctgtaatccaaacactttgtgaggccaaggcaggaggattgcttgaggccaggagtttaagaccagcctgggctacgcatagcaagacatagttcacacacacacatgcacgcacatgctcacacacacacacacacacacacacacaccccacctcacctcaccccacccctgggtgtagtggtatgcacctgtgtcttagctactggggaggctgagtggagagaaaagccttgagcccaggaggttgagggtgcagtgagctgtgattgtgccaccgcactccagcctgagcatgagtaatagagtgataccttgtttcaaataaataaataaatagataaaatataagtattctattacaagctgtcgttcaaatgagactttcttaatttggcaaccagaatagaaaatttgtcttatagaaattctttaattttggccgggcgcggtggctcacgcctgtaatcccagcactttgggaggccgaggcgggcggatcacgaggtcaggagatcgagaccatcccggctaaaacggtgaaaccccgtttctactaaaaaaaaaatacaaaaaattagccgggtgtagtggcgggcgcctgtagtcccagctacttgggaggctgagggaggcaggagaatggcgtgaacccgggaggcggagcttgcagtgagccgagatcccgccactgcactccagcctgggcgacagagcgagactccgtctcaaaaaaaaaaaaaaaaaaaaaaaaaaaaagaaattctttaattttaaaacaaatattcaagagagaatatttttgtttatcagattaaattgagaactcaaaattagcaatgctacattggtgttcttattgatgagtgagctttcatttaggattgtttagttgtaaaaccaatacttttagacaatcgaataactgacatgagactagaatacaaagatctgcagtcaccaagtagtgagacagatttttagcttgtgaacaagtttcttttcttctccttatcaattcaaatcaccatttgaattttccagaggcatacataaagtgccttattgtaaatttactctctccttcataaatactatatatttttttgagacagggtcttgctctgttacccagactcaggcagcctcaatctcctgcgctcaatgatcctcccacctcagcctcctgagtgctgggactataggcgtgtgccaccatacccagccaatttttgtattttttgtacagacagggtttcaccatgttgcccaggctggccttcagctcctgagctcaagtgatctgcccacctcagcctcccagaattctggaattataggcatgagacactatacccagtctcataattattgtttttaatgcaaaaagctagtaaagatgtaagacagtcaatcaaataattgaaataatcctctcttctcaaatccaaaggttttgtcttaattaccttgctacttttagattgaattaatccgtgaataaatattaatattgtcagttgtatctttcagtaccacctatgtgcccatttctttattaatgaattggaaccataaaaatatggagtttttaaataacattttcttttctgatgacagaaacaatacttacactgtgttaaaaacttggaaaataaaaacttagccagcctgggcaatacaatgagaccttgtctctacaaaaaaatttaaaaatagctgagcgtgatggcatacgcctgtagtcccagctactcaggaggcagaggtgggaggatctcttgagcctggaaagcggaggttgtagtgagccgagattgcaccactgcactccagcttgggtggcagagtgagaccttatctcaaaaaaagaaaaaatttgaaggaaaaaattattcaaaatttatcacctagagagaaccaactattaacattcttttaaactctcagtcttttgttctgcataaattttaggttttaagaatgatttttctttctctcccagtcatggcacagattgaaaaacaagagagatttgaacagtatactacctgtaagagctgctgtcctgaaaagataactggcctctatttcttaataaattcttccaagaaataaagaacaatagtttcatcataatacattatgtttacctccatcatagttgcttttttcatagttcttgttttcatgttttatttttaaaaagacatataaagattgcatattttattatgacatttcctaataaacccctttgatttaaaaatgtatttttaaaaatgtttacattgatgatgagtaatattgcatgtgttttcaggtgatcagataaaatatattttgggaaattaactgaacaaataaaaagtttttgatataacttcaattaattgtaccacatgctaatcctgaagagatgtgtagaattttggaaagggtctaattcatacatgcttaaagtataacctacgttagatagtttgttgtcaaagtctgttctagtaaagtgaagattcaagtcagttgttcagttacttgaagcaaaacgaaatctttcatttcagtcaaatcactgcagtcatgaaatactgaacaattgccttaagtctttgcttgactcactgggatagactgaggctttgggtgtgtctgtattagcatttcattagtacttcacatgcttttgatgtactcttgagattgctttaaattttgtattgaaacaacaatacattttgcactgtagtaatgggagcactaactcttacaacagttagtgaatcgttttaaagaatcagttcagtgtagacattttgaaaagattgtttcctgtgctttacgatagcttagtgcaatgtgcacttctgttttacttgccattttcctgctctgttttctctgtgacatgaagcaacagaaactgagatcaaagttaagattatatcctgtttgtagtatcagatatttttctgtgtacaattataggattgtaatctaaactggaatttttaggcagtaagtcaccacaaaatgttttagataagacacaataaaattattataaataaaagcttaatgtttgtaaaaaatctcttttttagtatttcttttttcacatgaaagaagtggtggctgctaaaaaaaaagctacagtgtttattaagggtctttttgatttatgtaaatatttgtaaattggtcagtgcctgtaaatttaaatataaaaagtaaccttgaaaacagttttaactttttcaaaagaactatgtccaacattttttagacctgctgtagtacagttttgtacctctaacgtattttttttttgcagaccaaatgctaaaacttttgcttttctttgacttgtaaaaggtgcacattttcattttcttccttaagttcaaatttttgtatgatgtcaaatgcaataaaatttatatatggacattgtt

SEQ ID NO: 1211 - DNA, 651 bp, Homo sapiens
gaaattatgcacacataactggccaaatatcagataagtgaactgttaatatatgagagaattttctggacttttaagttattaatctcaattatttgtgtggtgagtactaaattattttctgtttgtgttgatctgtccatttctgtatatagttgtccctcagtatattgagggattgattccaggtcaaccccgtcctcttcagataccaaaatccacagatactcaagtcccttatataaaatggtgtagtgtttgcatatatcctacacacattctcttgatactttaaatcatctctaaattacctgatacgtaatacaatgtaaatgctatgtaaatagttgttatactgtattgtttagggaataataatgacaagacaaaaagtctatacctgttcggtacagatgcaaccattctgcctcctccctaccccctcccaaatatttttcatcctggttgaattcacaaatcctacatggttacggagggttgactgtatttgcatatgttgttaaagtggtgtttaaaatgtgcaatctgtactacaattctaaattttggattgatttgaactaggatctttgcaaataaatctcatagacattaatgtttgtaagaaatttttaattaaatgatggaagg

SEQ ID NO: 1212 - DNA, 807 bp, Homo sapiens
gaaattatgcacacataactggccaaatatcagataagtgaactgttaatatatgagagaattttctggacttttaagttattaatctcaattatttgtgtggtgagtactaaattattttctgtttgtgttgatctgtccatttctgtatatagttgtccctcagtatattgagggattgattccaggtcaaccccgtcctcttcagataccaaaatccacagatactcaagtcccttatataaaatggtgtagtgtttgcatatatcctacacacattctcttgatactttaaatcatctctaaattacctgatacgtaatacaatgtaaatgctatgtaaatagttgttatactgtattgtttagggaataataatgacaagacaaaaagtctatacctgttcggtacagatgcaaccattctgcctcctccctaccccctcccaaatatttttcatcctggttgaattcacaaatcctacatggttacggagggttgactgtatttgcatatgttgttaaagtggtgtttaaaatgtgcaatctgtactacaattctaaattttggattgatttgaactaggatctttgcaaataaatctcatagacattaatgtttgtaagaaatttttaattaaatgatggaaggaacatagaatggctacctgtgattttgattagtgtttaacagattgccacagctgtgattgaattccttttgtactggatgagcatggtcatttgggattactgatggtgaagtctagctggtgttaagagaataaatattgctgatgctaaacct

SEQ ID NO: 1213 - DNA, 4478 bp, Homo sapiens
gcttcctgcctcaccagttggtacattttgtttttgaaagaggtgggatccaaaagagctgtttctagccacactccaagcacctgagactttgggcacaaggacacttttttttttttttttttttttttttggaatctcaccacacgggtgctctgacctgcttggaagaggccaacggggcagctctggaagggttgggggctcccctgacaaggcgctggggctgcagctctgtttagaatcaccttcgtggaccctgatgttagaatcccacccccagataattacctttcaagtcttaggtgagcagaattgcatatttattgagaaaagcaaagtggaccctttcttcctctccccttagtaatttatttttctgaaaatggattcttttgtgtttgtacagattgctagtctgtgtctgtctgatcagaaggatgtatccccatacctaacattccatatcactacactgatgtgggctggggccagtaggggcaggacaggtgccaggctggctgttcctctgcatgcctggtgcaccctgtggccgctagcccttggccaggccatcctgttgcagatcccagtgctgccacagggacaccaccaggcacctccctaggcaacgccaagcaggaggacctcacccacacccatggcaaagcaaaacaaaagaggcaccccgaccccattctacagaagccccagtccatggtcacctgtattctacctcacactccagcgtgggctttttccaggatgtgccctgagcctgttctgaacagctgtaaccccaactcccccacacaatgtgtctgcctgggaggtaagtaagtccagactgggtgtccaggagctggaacccagagagcgtcctgtccctaaccagccactgcagccctccagctctggccctcagctgcttgacaggacggactgctgggagatggcagccggttggcagggcccttgccctcacaccccgctgcccaggagccaggtctgaacttctgtgcacaggcctggcccctcagactcactcctgccaagaggggccacttcttcagggtgagccccggctatcaggcagccgtgagctccagggcgggctgcagctcccatccccttgcgccatgtttggagtaaagggatcagtggaagtggaggagccacttgggttctcctaagaccagcccttccggaggggccggtcctggaagaaacccataatccctggagtgtgaaaaagggcaaaaagaaaaagctggcctggtttccttcctccctgattgattgattgataggcacttcctcttgctcagtgcaatacctaccagtgctgctaaaccagggactcgcccagacctcagcaggcccccagggcctctccgtgcaacactccgtagccatgacagcagctctctgctgcccgcccctgcccagagctggcagaagccctctgttgcctttcctccctcagagcagagaggccccaggggagccagggccgagtggatcctaggatggccacggagagccactcgctcccagaacaggcaccccttcccaaaccagcttttctgcagccaattgcctgttgcagctgtggccactgcctcccggcactgtggcagactccccccaaggagggatggggggggcaccagtgaggatgccccatcctgcctcaggtccagaactctgaaaggtagggtgcccaccccgtgcttacttccggcccctagaggttgggggtggtcgttatctctcaagtggcctccaataccccatccagccacaccacctctgccttccatctgaccaatccccaggcctctggtcagggccaggacacctgagactcacccttagcacagcacaacctccagtgcccaaggcctctcccacaccccagccatccacacatctggccccacctgctcagtactactcaacatttgaattcgtgtaaatatttatttttgtgtgtgaacaatactacaaagtaatcagtaagatcttttgcaaaaatgttaccccaggcaattatttgtgaaaatcttaatgttaaaacctggcagagacaatcgccaccctagaattcctggtatcagttacttaacgtgtcacttctcctcccagaggcagtacccaagctagacatgaaccgtttgcatttcttggcagacaggagtgagaaagactggggaaggggctccctccccctacccacacaaggattagatctaaagatcagcataagctacagtttgaagtcatgtttttctgagttcaagctgttggaactgaccaccctccagcctgccttagtactgcggcaagagcgtaggttcaatgtgttttcaagagaaaggaaagaatatgttgttaaagtccattgggcctcccaggcccctccaggacaatggatttcatcatgtcgaccccacctcttgggtgggctcctcctttccagtgaaactacacctgaagccctagagatggcagaatcaggagcaagtttctgcatggaaacaggattccatttagctggctcagtcagggaacttgttttgcttttgttttaaaagatgcagcttcaaccccttccccctactcccgacttggagggcaccaaagagctggttctgatgaactaagctcactgctgtctcaccctcaccagagggactgccttctcccaaaaggagctcccaaagcccttgtcccacagccatttaaaaatcttctgaagggcctcagggcacaaagtgatcatttgggatcctaagttaaaaaggaaatgcaagagtaggatactccaattccagagtctttgcaggaggctaatcccacaagaagggtagcatcagagaagtgggcattggtcttagtggtggatcatcaggtagacaagtgatagtgtgtgtaacccatctgaaattcattttaccgtcaccactcttacaaaggacagtttattcccaaggacagtgctgacggggagggggacaggcagggagttaggagggttttcgaggatttcaaacaggtggaacccatccatccctattcccaagggccacttacaactctaagggtggttacaggattaactaccagttcattttcaaaatgctgctttgaactcagagggttgatacttttaatttgtaattttttgtaaaactttttacaaaatagtaaagtatttcaccagaataccagtttcaatccgtccatggtctgatttttatataatttagtggtgctttagaaactttgtttttgttgtttctgagctaaacagctcaatcctttttcgcctgtatctacctaagaccaatgtgaacctttgtatttttgctcctaattttggactcagtgaaagtgtactgtttacatgtacagatgcccccagtccctgtgtgttctgcaagacttgctcttgaggaggaagatgcacctcactaagctcatctgcttagcaaagccacaaacaaaaacctctcactttttacctacgtttccacctaaaaatacaacaaaaaacctataccacgtagaactcagattggctgaaaaacactttccacctggtagatggcccatatgcctcaattatgtggtccatttaggagcaggagtcagaagagagacctcttattggctgctggtgggtaactgcatggacagaggaaaagggaaggcaggactttgctgcagagctgtgggatgaatgtagttcttccctgggcagcctgggagtgggaaggtcagaatgactcatgttgccttcaggatcaagccatccaggatttagggacaacccaagaggtctttagtcctctggcataatttagacatgttttggaagagcatgagttccatatctgagatgagatttaagactttcagtgcagatagtacaagccatttcttcagggttcctctgggggcagctccttcatgaggtcccacctccggggaggggcacagggctccagatagtaagcacttaaggcaaacagtggatggcaccaacttttaaaggtgactctattaatggcttcacctctaaattatatttttacagatatgcacctatgcaacttaacgtggctcttctaagcaggtgaggacttcctcctcaatgctctctataaaaattatttgtgttctatatagtgagttttaccagtaaatgtggcttaatattttaattcttagaatgtgtcttctctacgtgatgtgactaaattctgttttgtttgtggaatgactagcacaggccgactccctctctccctcacttaacaaaagaccaatgagctgttaatcgagctgttatctccatggtattacttgctaaatgcactgatttcataagtatgtggaatccttttccttttgaatctgtatatcatatataagactgaatctacttaataaacactgaacaacaaaccgaa

SEQ ID NO: 1214 - DNA, 5681 bp, Homo sapiens
gcccatctccaagcagcccaaggagaagatccaggccatcatcgagtcctgcagccggcagttccctgagttccaggagcgggcccgcaagcgcatccgcacgtacctcaagtcctgccgtcgcatgaagaagaacggcatggagatggtgagtcccccctgcctggcccacactttccctcggtgccactactgacctcctgccacactcccaggatgcccgggccccttcacccagggtcttcccaggagccctggaagcaagtaccataatccctggtttgcaaatgagggaactaaggcccagaaagatcacacagctccatagactgaggcgctggagcccaaaccccaccctgtgccacccacccctggggcagggtctctgcacaagcccagggcccccacgggccccatgctagctccatccccgttctgcctgcagaccagacccacgccaccccatctgacctcggccatggcagaaaacatcctggcagctgcctgtgagagcgagacaagaaaggcagccaagcggatgcgtctagagatctaccagtcctcacaggtacctgccaccgcagccactacaggggccgctcctgggcagccagggagggcaggccttatatgggtgtggactgagggagctgtgatgggtacagtcgggagaagggcagagggggaacaggagggcaaagacaaggagaggaggtgggtggaggtcaggtgtgttgttctcagagctcctcagacctcatacggaagcctggacttcatctggagaccagagggccctgatcaaatacgctgacagggagatgagcagagttggggaaagcccccggggggaaggtggctgggggaggggacagacagaatcccacaggtcaaaccgcagcattgggtcccaggagtcctggggccgcagcatttatccaccttgtgtccagggatggtagttggggccagctgccccttggtttccccagcgcccccctctcccctctgcaggatgagcccatagccctggacaagcagcactcgcgggactccgcagccatcacccactccacctactcactgccagcctcctcctactcccaggaccctgtgtacgccaacggcggcctcaactacagttaccgcgggtacggggccttgagcagcaacctgcagccccctgcctccctccaaacaggaaaccacagtaatggtgagtcgggggaggcctgggctctggcttcccgaccagcacccagctgggtctgcagagcagccctgggcagcggaatggggagagggaagcagaggccagtgatggaaaggggctgcctcacagcatagggagcaggaggggcggctctggcacccttccacttcatcgtcttagctggtccttagattggaaggtgaaggagactcagttggttaaagcaaaaacctaccgcccccttctcaccgccagtgacgcttgctccaacacttcccaccttcactaccggcgcctctcactggttccactcccccagggtccctgtgggtgccgagtcccagccaagggcctgttcttggcctgagttgaatctccgcagccccgtctgtctcacccatagcgactgaggctcagtgagacagctgctggcctggcccagctgtggccccgctggcctgcagggcggctccctccccaggcctcagctcagggcctgccttgtgaggtgaaagctttcctcacctgggtgctgggcctccgttcttgcccctgcattcatggagcctacatctgagacacctggggtgatggtgcacacctgctccctcgctccgctcctgtagctgggtgattcagtaggtgcttttccggtaactccccaggctactctgcgcagatggggcacagaccattagaggagacagcccccgaagagacagaggcttcctcatggagtcaggtgctgccgtgagcacgaactggaatggggaacctcagacccctttactgtgaggccaagggaagcaggggaggagtggggtcagcctggtgggtcacaggacctcttgggccaggcactcgggttgtgttctgtgtgcaggaggagcccctgctaggttttaagcacagaagggccgtgaattgtgtggtctgtgtcattctgtctgcccctgtaagaaggtttgaatgggcagagcaagaggcagaagccatgtgctttgggggtcgttcagaagccagggaatgaagggaagaattgaggaacctgagtaggttggagaaaggtgccacctgtaagctggggaaccctggtgcaaggtcttggctaaacatgcctgaggattccctaagcccccatccttggctgcaggagacccctcactgttcctgggcagcaagggagggagctagtccccacccatggcaggaagcccaggctgcctccactcgccttgacccccgccaccccccagaaccaggaagtgtatgcaggtccctggaagattcctgcctgggcttaactcctcatcccttcctaatgcctcttaacctaaaataagaggccgcctggccctaatccctgaagctaaggccggagtggccagcacggtgagaggtggagtggctgtcctaggcgggctcctttcattccaggaagaaaagccctgccccccctacacatgggggtctggggctcagcaggtgaggtgagggtggtctggggcctgctccctcctagcagcaggcgatggtgacaagcctctacctggtgtccacccagcatgacctatttcagggctgcggctgccaagtccccctgaccctcctaagggcctctcatattagggctgagcctgcttcatgcctgcccgttcacacctgcccaagaggcacaaacagcagccagagaatgattcttccagggaggcagctggctctgcccttgtgcatcctggggtctcagtctcccatctgtgaataccctggttccttcatggtgggtggggaggccactgacgcagaaatctggtcatttacctccttgcctggggcagcccctgtccttgagcactagtacctcatttgaagaacattgtttaaatcctccagcagttgaaggaagacaacaggcagccacgtggttgcagggccacccagccccactggcctccccagcctcagcctttcaagtattgttcaatcagtttggtacctcagccgggcagccgtattaatggctcagagctcctcactttgctcattatgttgtcatctggagatgcaaatcagcttagatagaatcaggctcggcctgtcttgcctggggtgctgggtaactcatgctcactcctatccctctacccaccatacggcagtccctcggcaacctgagcatctggctgtaaccagagtctacacgggggtgtctccagatcagatcagctgcaggaaacagggaccttctcctttccaagcctcagctacagcccaggagagaagggaggaagctctgagcacaggcatgaacaggatagcacttggggagaggagaaaagaaaggaaccgggaccactgctcatgttgactatgccaggaggctctggccactcccaagcatgacgcagaggggaccagaaccaccctagagagaaccagaccctcttcccccgcatccctctgggtccatcccctgcaatatccagaagttagcagaggcactcctgttccaagcttctcagtcccgcattgtgacaacaccctgggagtcagtcacctgtttggctgctgtttccagacacagccccaaccccttccccctgtgtttgattttaacagactcaactgtttccttaactctcaattccaaggacgctatttagaaaatagttcctaggacctcctccttggtgtccacattctctggccggagaggaaataaccccatgtgacaaactgtcccatcttagactccagcttccttccccatttgggggctgcaccagcttccttttagcagcagtcaggtttccatagtttatcccaagatgttacttccagtctggatacctcccgtgacaagagcttgtccatctctcttcatagcagcataaaaactgccatggagatgcaatcatgagagaatgtgaccatcagaactttcagggtagctgggggagcctcacacccccgtggaagataaagctgtggggaagggactccagggggagggcagacaacagagaagctgacctggctgcatcagagaaggcttcccagggaagcggcagctctgcctgcacctgcccagattctctcttctttggctgtttcttgccgaacaccttgtagaatgcttttcaaattccaggagcttccaggtctcctgggagcccattcagaaagccctgaaacctctttggaagcccttccctattgggccagtctaggcagtcaggcctcctgtgggctgagaaggagcctcagcctgtgctgagtgtttcacagccggcatctcagcttctgctcgcaggagccgcctagttttggcagatgagggctctgaggcccagagaagttaaagaatttgccaatgaagtagcagagcaggacttgaatccacacttgcctgactccaaagccaggagcttcttgggaaaggccaagagaggacagggcctggcggtcccctccccaacacgcacacccctagtgtgttttgaaagatggcaggctccctctttgccatcatccgaggacaaagggcgggcagtttctccagaagcgagtctgagtcttgtcctgatggttccggcccacactccctcgtatcctagcagcatgaaccctccacctcactcaggcacaggactcctcccaggaggggggattcgaggtgcttgaggcttagcagaaagaggcttcacacacccagccccttcctccatccactggctgccatggtccctcctgggggtgcagttatggcctggccagtctggcctgtacctctccccccagacaaccagggcagctggcctctctccagctggacagaagcccctttcttgtctgggcacacagatgtttcttctcctggccttttgtggctcgactctcagctcctcctgggctttccccacacgcatctctcaggtgtgttgggcccctgcctacctgcagagtctcctgcacaccatctccccttccagcctcggtgtctgggctggggaagagcacacagatgggtgctgctcctttaggcacactggcagaggctttcttttagcacttgtcccacagttcctcaatggaagtagtatttcccattcccaagctctgctcaccacactgaggagaggcagatcttaggagttcctttgccccaaggccgcctcttcctcacctaaaaccggatccttgcaagatcaccctgaggattctctgagaaccctgtcgcccgcaggcccattctaagcactagggatagagccatcagggagatggaccagagccacggacttcagtgcccaactcacagtgggcactaggccataggttatgacagtgccaaggaaggtacacctcccagatgccaggcagggtggctgctcccttctcaccctacttccctctccacagggcccacggacctcagcatgaaaggcggggcctctaccacctccac

SEQ ID NO: 1215 - DNA, 275 bp, Homo sapiens
gcctgtaatggcttgactcttggaggtggagtctgcagtgagccgacgtcgtgctactgcactccagcctgggcaacagagcgagaccctgtcttttaagaaaatggtctttaagttcagtgtagcccttaaaagtgatgtacatggattaaggactggaagaaagtactgcaaagtgtttatatttgtatgcatggagagattacaggtagtatgctttgctcttgtccattttgtattttctgaatttcaaacagttaaaaaagaaaaaaaga

SEQ ID NO: 1216 - DNA, 122 bp, Homo sapiens
tcaggtggctgaggcaggagaatcacttgaaccctggaggcggatgttgtggtgagctgagatcgcaccattgcactccaacctgagcaacaagagtgaaactgtctcaaaaaaaaaggaaa

SEQ ID NO: 1217 - DNA, 377 bp, Homo sapiens
gtgtgtgtgtgcgttttctttcctgttgcttttgggataacttctaagctcctcctcatagcataggagacctttcatgttattttttttttaaagataaaataaatttttattttaaatttattattagttttagagatgagggtgttcactttgttgcccaggctggacttgaactcctggcctcaagcagtcccttcccccttgtgtagctggcactacaggcatatgccttcgcatgcccagctgtcttttgtgttttggtccagcttgcctctccagtccttactggcgctccatttcggctatactaaagtatttgtagttttgtgaatacccatcctatttttatagtttgtgcagtttctcagcatact

SEQ ID NO: 1218 - DNA, 316 bp, Homo sapiens
gaattcttggccgggcacggtggctcacgcctgtaatcccagcactttgggaggccgaggcgggcggatcacgaggtcaggagatcgagaccatcctggctaacacggtgaaaccccgtctctactaaaaatacaaaaaattagccgggcgtggtagcgggcgcctgtagtcccagctactcgggaggctgaggcaggagaatggcgtgaacctggcaggcggagcttgcagtgagccgagatcgcgccactgcactccagcctgggtgacagagcgagactccgtctcaaaaaaaaaaaaaaaaaaaaagaattc

SEQ ID NO: 1219 - DNA, 303 bp, Homo sapiens
ccaggcgcggtggctcacgcctataatcccagcactttgggaggccgaggcaggtggatcacgaggtcaggagattgagaccatcctggctaacatggtgaaaccccgtctctactaaaaattacaaaaaattagccaggcgtggtggcgggtacctgtagtcccagctgcttgggaggctgaggcaggagaacggtgtgaacccaggaggtggagcttgcagtgagctgagattgcaccactgcactccagcctgggcgacagagcgagactccatctcaaaaaaaaaaaaaaaaaaaaacc

SEQ ID NO: 1220 - DNA, 1052 bp, Homo sapiens
tcacgcctgtaatcccagcactttgggaggccgaggcaggtggatcacgaggtaaggagatcgagaccatcctggctaacacggtgaaaccccgtctctactaaaaatacaaaaaattagccgggcatggtggcaggcgcctgtggtcccagttacccaggaggctgaggcaggagaatggcgtgaacccgggaggcggagcttgcagtgagccgagatcgagccactgcactccagcctgggcaacagagctagactccgtctcaaaaaaaaaaaaaaattattgtttatatttgagatgagaattcttgatacattttttggtatattaaaaagtgagataaattgtttgtgctttaacatgtaaattgcatcgtagattcataaaattcatcttggatttatttctagcacagtactttctattgaaagcagtttactatcaagaaaatctatcaaaggggatggaatcccattcttcattttcatgaattgttttaaaaagtgttcttctggccagggtcggtggctcacacctgtaatcccagcactttgggaggtcgaggtgggtggatcacgaggtcaggagatcgagaccatcctggccaacatggtgaaacctcgtctctgctaaaaatacaaaaatttgctgggtgtgaccgcacgtgactgtaatcccagctactcgggaggctgaggcaggagaatcgcttgaacctgggaggcggaggctgcagtgaaccaagatcgtgccgctgcactccagcctggcaacagagccagactccgtctggaaaaaaaaacaaaacaaaaaacaatgccgggcgcggtggctcacgcctgtaatcccagcactttgggaggccgaggcaggcggatcacgaggtcaggagatcgagaccatcctggctaacacggtgaaaccctgtctctactaaaaatacaaaaaattagccgggcgtggtggcaggcgcctgtagtcccagctactcgggaggctgaggcaggagaatggcatgaacccgggaggcggaacttgcagtgagccgaga

SEQ ID NO: 1221 - DNA, 293 bp, Homo sapiens
gtggctcacgcctgtaatcccagcacttcgggaggccgaggtgggtggatcacgaggtcaggagatcgagaccatcctggctaacacggtgaaaccccgtctctactaaaaatacaaaaaattagctgggtgtggtggcgggcgcctgtagtcacagctacttgggagactgaggcaggagaatggcatgaacccgggaggtgcagcttgcagtgagcagagatctcgccactgcactccagcctgggcgacagagcgagacttcatctcaaaaaaaaaaagaaagaaagtaa

SEQ ID NO: 1222 - DNA, 272 bp, Homo sapiens
gggccgggcacggtggctcaagcctgtaatcccagcactttgggaggccaaggagggtggatcacgaggtcaggagattgagaccatcctggctaacacggtgaaaccccatctctactaaaaatacaaaaattagccgggtgtggtgtcaggtgcctgtagtcccagctactctggaggctgaggcaggagaatggtgtgaacccgggaggtggagcttgcagtgagcggagatcacaccactgcactccagcctaggcgacagagtgaga

SEQ ID NO: 1223 - DNA, 183 bp, Homo sapiens
tgtggtggctcacgcctgtaatcccagcactttgggaggcggaggcgggtggatcacgaggtcaggagatcgagaccatcctggctaacatggtgaaaccctgtctctattaaaaatacaaaaaattagctgggcgtggtggtgggcgcctgtagtcccagctgctcaggaggctgaggcagg

SEQ ID NO: 1224 - DNA, 149 bp, Homo sapiens
tcacgcctgtaatcccagcactttgggaggccaaggtgggcagatcactaggtcaggagattgagaccatcctggctaacatggtgaaaccccgtctctactaaaaatacaacaattagccgggtgtggtggcgggtgcctgtagtccc

SEQ ID NO: 1225 - DNA, 318 bp, Homo sapiens
gactcacgggcgggcgcggtggctcacgcctgtaatcccagcactttgggaggccgaggcgggtggatcatgaggtcaggagatcgagaccatcctggctaacaaggtgaaaccccgtctctactaaaaatacaaaaaattagccaggcgcggtggcgggcgcctgtagtcccagctactcgggaggctgaggcaggagaatggcgtgaacccgggaagcggagcttgcagtgagccgagattgcgccactgcagtccacagtccggcctgggtgacagagcgagactccgtctcaaaaaaaaaaaaaaaaaaaaaaa

SEQ ID NO: 1226 - DNA, 140 bp, Homo sapiens
ttctcacgcctgtaatcccagcactttgggaggccgaggtgggtggatcacgaggtcaggagatcgagaccatcctggctaacatggtgaaaccccgtctctactaaaaaaacacaaaaaattagctgggcatggtggca

SEQ ID NO: 1227 - DNA, 223 bp, Homo sapiens
tggctcacgcctgtaatcccagcactttgggagtccgaggcaggtggatcacgaggtcaggagatcgagaccatcctggctaacatggtgaaaccccgtctttactcaaaatacaaaaaaattagccaggcatggtggcgggcgcctgtagtcccagctactctggaggctgaggcaggagaatggtgtgaacccccgaggaggagcttgcagtgagccgaga

SEQ ID NO: 1228 - DNA, 281 bp, Homo sapiens
cacgcctgtaatcccagcactttgggaggccgaggcgggtggatcacgaggtcaggagatcgagaccatcctggctaacacagtgaaaccccgtatctactaaaaatacaaaaaattagcagggtgtgggggggggcgcctgtagtcccagctactcaggaggctgaggcaggagaatggcgtgaacccgggaggtggagcttgcagtgagttgagattgcgccactgcactccagcctgggcgacagagcaagactccatctcaaaaataaataaataaa

SEQ ID NO: 1229 - DNA, 300 bp, Homo sapiens
gcgcggtggctcacgcctgtaatcccagcactttgggaggccgaggcgggtggatcacgaggtcaggagatcgagaccatcctggctaacacggtgaaaccccgtctccactaaaaatacaaaaaattctccgggcatggtggcgggcgcctgtagtcccagctactccagaggctgaggcaggagaatggcatgagcccaggaggcggagcatgcagcgagccgagatggaaccactgcactccagcctgggtgacagagcgagactccgtctcaaaaaaaaaaaaaaaaaaaccacac

SEQ ID NO: 1230 - DNA, 205 bp, Homo sapiens
tcccagcactttgggaggccaaggtgggcggatcacgaggtcaggagatcgagaccatcctggctaacacggtgaaaccccgtctctactaaaaatacaaaaattagccaggtgtggtggcgggcatctgtagtcccagctactctggaggctgaggcgggagaatggcgtgaaccccggaggcagagcttgcagtgagccgaga

SEQ ID NO: 1231 - DNA, 167 bp, Homo sapiens
gggccgggcgcagtgactcacgcctgtaatcccagcactttgggaggccgaggcgggtggatcacgaggtcacgagatcgagaccatcctggctaacacagtgaaaccccgtctgtactaaaaacacaaaaaattagccgggcatgttggcaggtgcctgtagtccc

SEQ ID NO: 1232 - DNA, 300 bp, Homo sapiens
ggcgcggtggctcacgcctgtaatcccagcactttgggaggccgaggcgggcggatcacaaggtcaggagattgagaccatcctggctaacacggtgaaatcccgtcttactaaaaatacaaaaaaaaattagccaggcatggtggcgggcgcctgtagtcccagctactccggaggctgaggcaggagaatggcgtgaacccgggaggcggagcttgcagtgagcagagatcgcgccactgcactacagcctgggcgacagagcaagactccgtctcaaaaataaataaataaataaaa

SEQ ID NO: 1233 - DNA, 226 bp, Homo sapiens
gggtgcagtggctcacgcctgtaatctcagcactatgggaggccgagacgggtggatcatgaggtcaggagatcgagaccatcctggctaacacggtgaaaccccgtctctactaaaaatacaaaaaaattagctgggcgtgatggcaggtgcctgtagtcccagctactcgggaggctgaggcaggagaatggcatgaaactgggaggcggagcttgcagtgagc

SEQ ID NO: 1234 - DNA, 305 bp, Homo sapiens
gtggggccaggcgcggtggctcatgcctgtaatcccagcactttgggaggccaaggcgggtggatcacgaggtcaggagatccagaccatcctggctaacacggtgaaaccccgtctctactaaaaatacaaaaaattagccaggtgtggtggcgggtgcctgtagtcccatctactccagaggatgaggcaggagaatggcgtgaacctgggaggcggagtttgcagtgagccgagatggcgccactgccctgcagcctgggcgacagagagagactccgtctcaaaaaaaaaaaaaaaaaaaa

SEQ ID NO: 1235 - DNA, 275 bp, Homo sapiens
gcctgtaatcccagcactttgggaggctgaggcgggtggatcacgaggtcaggagatcgagatcatcctggctaacatggtgaaaccccgtctctactaaaaatacaaaaaattagctgggcatggtggcgggcacctgtagtcccagctactcgggaggctgaggcaggagaatggtgtgaagctgggaggcggagcttgcagtgagcccagattgtgccactgcactccagcctgggtgacagagcaagactctgactcaaaaaaaaaaaaaa

SEQ ID NO: 1236 - DNA, 1365 bp, Homo sapiens
tgcctgtaagcccagctactcgagaggctgagcaccaaaatggggatgctagtcacacttacgtcctagggttcttggggatgaaatgggttcttacttgtacaactcttgaagtggtgtgcctggcatgtgacaagcatgcagcagatgtgatgctagctttcattattattggctatttgccatatccacggatgtcatcttgtcccttgtctcctttaattattgacagaagttgacacaagtgatcatctcatcctttaaaaagtgctttctctcttcccttggctactaggacactttactgtcgtcgttcttttccagtgtcattggccattttcagctccttcattagtttctctcccacttgtcttttaaatgcatgtatttctcaaggatctcttcatctaaatgtccttccctcaaattgctgtcttgtgcattttcctttttagttaatactattatatcctccaagtcactcaggattgttaccgtgaaatcatccagaattctgtctcctcctttgtctcccttttcagaccactccaaagctgaccttttttcaaattttgttgattggacctaccccatcttatgcatggccttctcatgttcgatgctacgatcccattttggatatctggtcattctctttttctgtcttctcattactgtcagagttctctttcttaaagttcagccctaatgtcactccccattgcatgaagtggtggtctccaaagaggggcgctggcataataggaggtatgcaaataagtacatttggatatgaaaagaaaatattcaagctgtatttatgcttaagttaagctttactaatatttggtgcatgcattggtacctttattggctctataagccatttgctcatatatcttgaagtacccaagggaagactgcaagatgaattaatggtcttccactgtttgttgcttctcagcatattgcagtctattaaagcttccatgtatctgcttaagtagatctacagggtaaagcatgtagtttttaagatgcatgtgttctcaaaaagggtaagtgacataaaatatttgtacagaaaaggggccgggcgcagtggctcacgcctgtaatcccagcactatgggaagccaaggcgggtggatcacgaggtcaggagattgagaccatcctggctaacatggtgaaaccccgtctgtactaaaattacaaaaaaaaattagctgggtgtggtggcaggtgcctgtagtcccagctactcgggaggctgaggcaggagaatggcgtgaacctgggaggcggaacttgcagtgagccgagattgcgccactgcactccagcctgggcgacagagcgaga

SEQ ID NO: 1237 - DNA, 2364 bp, Homo sapiens
ctcactcctgtaatcccagcactttgggaggccgaggcgggcggatcacgaggtcaggagatcgagaccatcctggctaacacggtgaaaccccgtctctactaaaaatacaaaaaaaaaattagccgggcgtggtagcgggcgcctgtagtcccagctactcgggaggctgaggcaggagaatggcgtgaacctgggaggcggagcttgcagtgagccgagatcgcgccactgcactccagcctgggcgacagagcgagactccgtctcaaaaaaaaaaaaaaaaaaaaaaaagaataaagtataagagaacatgagtgaatgcctgtcatctttttttttttttcttcaaaaacagggtctcactttgtcacccaggctgcagtgcagtggcgcaatcatggctcactgcaacctctagcacctgggctcaagagctcaagaggtcctaccaactcagcctcccaaggagctgggactacaggtgcatgccaccacaccctaaggtaaatttttgtgtttttatagagacaggttttaccatgttgcccaggctgttctgaaactcctgggcttaagggatcgacccacctccatctcccaaggcactgggattataggcatgagccaccgcgcctggcctatcatcatttattcatttattcatctatgcaaaaatattctttgagtgcctaattgctaagcaatgggacaagcactggcaagtcacactggcaaaatatcatcccgccactcaaggagcttataggtcagctggggagacaaagaagaacatgggcccttgtaatgagctaagtatggtgctaggggaaatatccataagttatgggaacccagaggaattcattcatttattcgtttagtaaatatttatgtgccaaactcttgggacccaatggtgacctaagcagacaagacacatccacctacagtgtttacagagtagtgtgggagacagacattaatgaaatgctcttacagacctatcattacctattgtcatatgagttatgaaagaaaaataacaggccgggcatgatggctcacgcctgtaatcccagcactttgggagaccaaggcaggtggatcacttgaggtcaggagttcaagaccagcctggccaacatgatgaaaccccatctctactaaaaatacaaaaaaaaaaaaattatctgggcatggtggcaggcagctgtaatcccagctactcgggaggctgaggcaggaaactcgcttgaacctgggaggcagaggttgcactgagctgagattgcaccactgcactccagcctgggtgacagagcaagactctgtcaaaaaaaaaaaaaaaaaagaaaggaaggaaaggaaggaaggaaggaaggaaggaaatagagtgtaagaggggggcctagtgtagtctaagatgactcaggagaagctgtttgagctgatgcctgaagacgggttgcatgtaagtagttgagtaggtaaaagagaggggtactatcatatcagggattcgggagaaaaaaaaagagagagagagaggggaagagtgctgtggacccattgagctccagcccagctccaactctgtgggtcaggaaagactttccagcatctaagctgagtccagaaggatgagtaggagtgagccagctgaggaggagctggggtggaaggaaagcattccagagcagcagatagcttgtgcaaaggcacacaggcagctgggtgtggtggctcacacctgtaatcccagcactgtgggaggccaagatgggtggaccgtttgagcccaggaattcaagaccaacctggatgacatagtgaaaccctgtctctaccaaaaaaaaaaaaaaaaaaattgaaaaaaaaaaagaagctgggcatggtggcgtgcacctgtggtcccagctacccaggaaactgaggtgggagggaagtcgaggctgtagtgaaccatggtggcaccattgcattccagcccgggtgacagagcaaggccctgtacaaaaaaaaaaaaaaaaaaagcatggaggcaacagaacatagtggattggaaggaaaaacaagtggttcagaccaggtgcagtggctcatgcctgtaatcccagcactttgggaggccgaggcgggcagatcacgaggtcaggagatcaagaccatcctcgctaacacagtgaaaccccgtctctactaaaaatacaaaaaaattagccaggcgtggtggtgcgtgcctgtagtcccagctactcaagaggctgaggcaggagaatggcgtgaacctgggaggcagagcttgcagtgagcggagatcatgccactgcactccagcctgggcgacagagcaagactcca

SEQ ID NO: 1238 - DNA, 289 bp, Homo sapiens
aggccgggcgcagtggctcacgcctgtaatcccagcactttgggaggccgaggagggtggatcacgaggtcaggagatcgagaccatcctggccaacatggtgaaaccccgtctctactacaaatacaaaaattagcagggcctggggcgggcgcctgtagtcccagctacttgggaggctgaggcgggagaatggcgtgaacccgggaggcggagcttgcagtgagccgagatcgcgcactgcactccagcctgggtgacagagcgagactccctctcagaataaata

SEQ ID NO: 1239 - DNA, 298 bp, Homo sapiens
ttgggccgggcgcagtggctcacgcctgtcatcccagcactttgggaggccgagacgggtggatcacgaggtcaggagatcgagaccatcctggctaacacggtgaaaccccgtctctactaaaaatacaaaaaattagccgggcgtgttggcgggcgcctgtagtcccagctactcgggaggctgaggcaggagaatggcgtgaacccgggaggcggagcttgcagcgagcggaaatcgcaccactacactccaggctgggggacagaacgagaccccatctcaaaaaaaaaaagaa

SEQ ID NO: 1240 - DNA, 311 bp, Homo sapiens
agggataggccgggcgcggtggctcacgcctgtaatcccagcactttgggaggccgagacgggcggatcacgaggtcaggagatcgagaccatcctggctaacatggtgaaaccctgtctctactaaaaatacaaaaaaaattagccggttgtggtggcgagtgcctgtagtcccagctactccagaggctgaggcaggagaatggcatgaacccgggaggcagagcttgcagtgagccgagatcgtgccactgcacttgagcctgggcgacagagcaagactccatctcaaaaaaaaaaaaaaaaaaaaa

SEQ ID NO: 1241 - DNA, 131 bp, Homo sapiens
agtggctcatgcctgtaattccagcactttgggaggctgaggtgggtggatcacgaggtcaggagattgagaccatcctggctaacatggtgaaacccagtctctactaaaaatacaaaaaaaaaaagaaa

SEQ ID NO: 1242 - DNA, 175 bp, Homo sapiens
cacgcctgtaatcccagcactttgggaagcccaggtgggcggatcacgaggtcaggagatcaagaccatcctggccaacatggtgaaaccccgtctctactaaaaatacaaaaaaattagccgggcgtggtggcccgcgcctgtggtcccagatactcgggagtctgaggcagga

SEQ ID NO: 1243 - DNA, 1365 bp, Homo sapiens; identical to SEQ ID NO: 1236

SEQ ID NO: 1244 - DNA, 320 bp, Homo sapiens
atggtggctcacgcctgtaatcccagcactttgggaggccgaggcgggcggatcacgaggtcaggagattgagaccatcctggctaacacggtgaaaccccgtctctactaaaaatacaaaaaaattagccgggcgtggtggcgggcacctgtagtcccagctactcaggaggctgagacaggagaatggcgtgaacccgggaggcagagcttgcagtgagccgagattgcaccactgcactccagcctgggcaacagagcaagactccgtctcaaaaaaaaaaaagaaaaaagaaaagaaaagaaaagaaaacgaagtc

SEQ ID NO: 1245 - DNA, 308 bp, Homo sapiens
caggccgggcgcggtggctcacgcctgtaatcccagcactttgggaggccgaggcgggcggatcacgaggtcaggagatcgagaccatcctggctaacacggtgaaaccccgtctctactaaaaatacaaaaaattagccgggcgtggtggtgggcgcctgtaatcccagctactcgggaggctgaggcaggagaatggcatgaacccaagaggcggagcttgcagtgagccgggatagcgccactgcagtccagcttgggcgaaagagtgagactccgtctcaaaaaaaaaaaaaagttgaataaac

SEQ ID NO: 1246 - DNA, 300 bp, Homo sapiens
gctcacgcctgtaatcccagcactttgggaggccgaggcgggcggatcacgaggtcaggagatcgagaccatcctggctaacacggtgaaaccccatctctactaaaaatacaaaaaattagccgggcgtggtagcgggcgcctgtagtcccagctactcgggaggctgaggcaggagaatggcgtgaacccgggaggcggagcttgcagtgagccgagatcgcgccactgcactccagcctgggcgacagagcgagactccgtctcaaaaaaaaaaaaaaaaaaaaaaaaaaaaattaa

SEQ ID NO: 1247 - DNA, 140 bp, Homo sapiens
aggccgaggcgggtggatcacgaggtcaggagatcgagaccatcctggctaacatggtgaaaccccatctctactaaaaatacaaaaaaatagccgggcgcggtggtgggcgcctgtaggcccagctacttgggaggctg

SEQ ID NO: 1248 - DNA, 142 bp, Homo sapiens
taaaggctgggcgcagtggctcacgcctgtaatcccagcactttgggaggccgaggcaggtggatcacgaggtcaggagattgagaccatcctggctaacatggtgaaaccccgtctctactaaaaatacaaaaaaaaaaaa

SEQ ID NO: 1249 - DNA, 322 bp, Homo sapiens
cggccgggcgcggtggctgacgcctgtaatcccagcactttgggaggccgaggcgggcggatcacgaggtcaggagatcgagaccatcctggctaacacggtgaaaccccgtctctactaaaaatacaaaaaattagccgggcgtggtagcgggcgcctgtagtcccagctactcgggaggctgaggcaggagaatggcgtgaacccgggaggcggagctttcagtgagccgagatcgcgccactgcactccagcctgggcgacagagcgagactccgtctcaaaaaaaaaaaaaaaaaaaaaaaaaaaaaaaaaaaaattc

SEQ ID NO: 1250 - DNA, 281 bp, Homo sapiens
tcccagcactttgggaggcctaggcgggcggatcacgaggtcaggagatggagaccatcctggctaacacggtgaaaccccgtctctactaaaaatacaaaaaaaaattagccgggcgtgatggcgggcgcctgtagtcccagctactcaggaggctaaggcaggagaatggcatgaacccaggaggcagagcttgcagtgagccaagatggcgccactgcactccagcctgggcgacagagcgagactccgtctcaaaaaaaaaaagacaacaacaacaa

SEQ ID NO: 1251 - DNA, 270 bp, Homo sapiens
tgggaggccgaggcaggtggatcacgaggtcaggagatcgagaccatcctggctaacacggtgaaaccccgtctctactaaaaatacaaaaaattagccgggcgtggtggcgggcgcctgtagtcccagctactcgggagactgaggcaggagaatggcgtgaacccgggaggcggagcttgcagtgagccgagatcgcgcccctgcactccagcctgggcgacagagcgagactccgcctcgaaaaaacaaaaacaaaaacacaaagtc

SEQ ID NO: 1252 - DNA, 296 bp, Homo sapiens
cggtggctcacgcctgtaatcccagcactttgggaggccgaggcgggtggatcatgaggtcaggagatcgagaccatcctggctaacaaggtgaaaccccgtctctactaaaaatacaaaaaattagccgggcgcggtggcgggcgcctgtagtcccagctactcgggaggctgaggcaggagaatggcgtgaacccgggaagcggagcttgcagtaagccgagattgcgccactgcagtccgcagtccggcctgggcgacagagcgagactccgtctcaaaaaaaaaaaaaaaaa

SEQ ID NO: 1253 - DNA, 278 bp, Homo sapiens
cctgtaatcccagcactttgggaggcctaggcgggtggatcacgaggtcaggagattgagaccatcctggctaacatggagaaaccctgtctctactaaaaatacaaaaaattagccgggcgtagtggcgggcgcctgtagtcccagcaactcgggaggttgaggcaggagaatggtgtgaacctgggaggtggagcttgtagtgagccgagatcgcgccactgcactctagcctgggcaacacagcgagactccgtctcaaaaaaaaaaaaaaaaga

SEQ ID NO: 1254 - DNA, 299 bp, Homo sapiens
ataggccaggcgcggtggctcacgcctgtaatcccagcactttgggaggccaaagcgggcggatcacgaggtcaggagatcgagaccatcctggctaacacggtgaaaccccgtctctactaaaaatacaaaaaattagcccgctgtggtggcgagcgcctgtagtcccagctacttgggaggctgaggcaggagaatggcatgaacccgggaggtggagcttgcagtgagccgagatcacaccaccgcactccagcctgggtgacagcacgagactccgtctcaaaaaaaagaaaaga

SEQ ID NO: 1255 - DNA, 1365 bp, Homo sapiens; identical to SEQ ID NO: 1236

SEQ ID NO: 1256 - DNA, 306 bp, Homo sapiens
tggggccgggcgcagtggctcacgcctgtaatcccagcactttgggaggccgaggcgggcggatcacgaggtcaggagatcgagaccgtcctggctaacacggtgaaaccctgtctctactaaaaatacaaaaaattagccgggtgtggtggtgggcacctgtagtcccagctactcagagaggctgaggcaggagaatggcgtgaacccgggaggcggagcttgcagtgagccgagatcgcgccaccgcactccagcctgggcgacagagtgagaatccgtctcaaaaaaaaaaaaaaaaagact

SEQ ID NO: 1257 - DNA, 1087 bp, Homo sapiens
ttttttttttttttttttattatactctaagttttagggtacatgtgcacattgtgcaggttagttacatatgtatacatgtgccatgctggtgcgctgcacccactaatgtgtcatctagcattaggtatatctcccaatgctatccctcccccctcccccgaccccaccacagtccccagagtgtgatattccccttcctgtgtccatgtgatctcattgttcaattcccacctatgagtgagaatatgcggggtttggttttttgttcttgcgatagtttactgagaatgatggtttccaatttcatccatgtccctacaaaggatatgaactcatcattttttatggctgcatagtattccatggtgtatatgtgccacattttcttaatccagtctatcattgttggacatttgggttggttccaagtctttgctattgtgaatagtgccgcaataaacatacgtgtgcatgtgtctttatagcagcatgatttatactcatttgggtatatacccagtaatgggatggctgggtcaaatggtatttctagttctagatccctgaggaatcgccacactgacttccacaatggttgaactagtttacagtcccaccaacagtgtaaaagtgttcctatttctccgcatcctctccagcacctgttgtttcctgactttttaatgattgccattctaactggtgtgagatgatatctcatagtggttttgatttgcatttctctgatggccagtgatgatgagcatttcttcatgtgttttttggctgcataaatgtcttcttttgagaactgtctgttcatgtccttcgcccactttttgatggggttgtttgtttttttcttgtaaatttgtttgagttcattgtagattctggatattagccctttgtcagatgagtaggttgcaaaaattttctcccatgttgtaggttgcctgttcactctgatggtagtttcttttgctgtgcagaagctctttagtttaattagatcccatttgtcaattttgtcttttgttgccattgcttttggtgttttggacatgaagtccttgcccacgcc

SEQ ID NO: 1258 - DNA, 523 bp, Homo sapiens
agaaaatacaactggttgcttgcttttataggaattttccctggaggccacacgaaaccacttgtgcctcagaacaactcatgactgggggagtaaggacaagcagtatatccattggcttctttctgtgtctcgtttcttactggttaatgtctactcctggggtatttcacttttccacacttcttagttatgtttcctggcctctttgaggagctgctgggaagacagagctttaattggtcctgttagagttatgaacaggaatggtggtttgtctctcttttctgggaagatacataactccagaaactgtgagagtcttttctggggctacaagacaagtggctgaagccaggggtgaggtgagaggtgatagtgtggttggtgggtgtgcaagcagggccaagcaaattcaaggtggggcatattctaggacttacacaacagtctggaaataaatatgtattttagaatattgagattctaaactaagaatgatgtcttacgtaaaattacaaaa

SEQ ID NO: 1259 - DNA, 686 bp, Homo sapiens
ccatttcagtgtggccctcttcatccacaaagtggtttggaatgaaaaatgctaagatgcagtatttggctggcacttagataactaagaaaagagaattgacttaactgtagcaaagagagttgacgtgaggctcaagtcatcttagggctcctaggagaggatgagaatccattagcacctctatatctggggagaggggtgttgccaagaaggcctgttttgtaagtttgttttcattgacactgaatttaatttatatcttagaaactatccagagaagtctaaagttaaaagtttgagaactgcaatgtagtagtcaaagaggccacagcttggatgaaaaatttcagctgctatgattagagaaaaacacaaacaaattaaaaatcaatattgtctcccttttttcaagcccctgatcagtcagtagtcaccttgagaacccaaagggattgaatacagtggagaggatccaaaaacggaaccagacatgacctgtgaggcaggaagtacagcatgaacttttattgaaaacagctcaacagtgatatcattggctgacgatggaggaggctattttatatctctctggaatataagtttaaaaattacattactctgtaaacaacagaaacagtacaacaaaagtttctttaacaaccatacctatctgtaatacaggc

SEQ ID NO: 1260 - DNA, 98 bp, Homo sapiens
tagtagagacgaggtttcaccatgttggccaggctggtctcgaactcctgacctcaaatgatccacctgccttggcctcccaaagtactgggattaca

SEQ ID NO: 1261 - DNA, 2327 bp, Homo sapiens
gcctttttgtctgtctttatttacagcaaagtacataatatgtggtcactttgtaaccactaacaataaaggtagggtggtaaaaagaaaagggagaggagcaagcatcttaaaaggggggaaaaaaaagcctaagtctgtatttagctactcaccctgctcctgaggcaggactgggtaggcactccctgcctctaagaccacagccaagctgacctggaatgccagtccccggtatgaggaaggcagcagaacgcccagagacaaaagattaaaggggactgagctctggatgcatccacttatgctttgccagacagttcccttccttgttttgtttgaatgcttcccccaccccgccctgagcaaagtgtaaagggcaacggtggtacagaagtacaggcagtcccttccagaagcagtcctgaaccgcataacccacctacctagctgctcctcagcctgccgagttcttggccctggaatctttaacaggcacataggagattccagggcaggggaaaatatttccctgcaagaggctacttccctccaacagctgtgagggccagtgcaggtcaaggttgctaaatcaaggaaagtgcacaagggcaagagaggtcatatacaaaccaaccaggcttccggccctcctgctgcccgactgctccgaggtgtacacaagcctccagcccgacccagcggcctaatgaaactctggcaacctatcctgggcgtggccacaagtatccagctccaagcccaagtgaggcggggagtcaacttccccatgattgccaagtggccaagaccagaagcagggatgattaggctagttctgcggcaaggtgaactggagaccctgtctctgccctccttccctggcctgtcccacagacatcccgttgtttaacccactgcctttgcaaggacctgctctgtccactccaaatcaaaggatacttgcatccttcttacacagactcccatctctctgctcatagtggtcccaggctgcccgagaaaaagaaacttgggtcagtagaaggctcattagtgtgaaggagtgagaggccaggccttcctgtgacataatgcttctatgcttgtttcctaaacacttggtccacacacaatacctgggcaggaagagagaaccaagcaccactggatggctctggagccaggggacttctatgcacatacaaccaacatcaccccactctgctcatctgtgcctccaccctgaacagcagagtacctagatggcaaatgtcatggtttctggtccactaattctactcctgactctccatggaatcagagacccagaggctcttaaaaaactaagaccattgtttgttccatagaaagctcaagttcagatacagagttggccaaatgctgggctgccacggaggggtagagccttccatcccttccttgttccagaaacagtgtgtcacagaccccagcagacactgttcattgtccccagccaagccaccaagaattggtgatcatttgacaaggggcagggcagcccttatagctgtttccaagctaggagtgggctattcagagatattggaggcttggtcccaacaccacaggtagatgaggaagcagctaggtaaaggctcagagatgagaggagtccatcttccaaggcagtgggataaacagccaaggcactaaatggtttggcacctgggagcttcaagtaaagttgagcatgctgcccactgaaaagccaaggctctcccagacacgggtgggcttcacctgagcacagcccagtgccatcaaggccaggggccctgtgtcctcaggatactaacccaggcctgcattccctgcttcatctcagaactgatcaaggcatgactacaaggataatgattgatcctgaactgatcttggtgagcaccggctttcaaaggaggcatcttgggagccttcccttgctccaagtaggcggctgctgtgactgggagctcccttcagagcctgcacggtctcctgaaagtctccgggtggcaagctctgctggggaccaggtttgactttttaaaatagcaaaacagatttagagtcaaactgagcccagaaacggggaatcagactggatggtgctgagtctgggggaaaatctggtgtgaccaggtaataatggagaccaatttacctgaatggctcgaacaggctctgagagcaatgggaagaaaaggttctccaaaatgtttctggcaatggcagccacagtgggatagctaagggcacagtccaccaagcactagggtggtcaacaatgaaatgaacatctc

SEQ ID NO: 1262 - DNA, 685 bp, Homo sapiens
ccatttcagtgtggccctcttcatccacaaagtggtttggaatgaaaaatgctaagatgcagtatttggctggcacttagataactaagaaaagagaattgacttaactgtagcaaagagagttgacgtgaggctcaagtcatcttagggctcctaggagaggatgagaatccattagcacctctatatctggggagaggggtgttgccaagaaggcctgttttgtaagtttgttttcattgacactgaatttaatttatatcttagaaactatccagagaagtctaaagttaaaagtttgagaactgcaatgtagtagtcaaagaggccacagcttggatgaaaaatttcagctgctatgattagagaaaaacaaaaacaaattaaaaatcaatattgtctcccttttttcaagcccctgatcagtcagtagtcaccttgagaaccaaagggattgaatacagtggagaggatccaaaaacggaaccagacatgacctgtgaggcaggaagtacagcatgaacttttattgaaaacagctcaacagtgatatcattggctgacgatggaggaggctattttatatctctctggaatataagtttaaaaattacattactctgtaaacaacagaaacagtacaacaaaagtttctttaacaaccatacctatctgtaatacaggc

SEQ ID NO: 1263 - DNA, 98 bp, Homo sapiens; identical to SEQ ID NO: 1260

SEQ ID NO: 1264 - DNA, 126 bp, Homo sapiens
ttaagatttctaactacatttacttccttgacgaagcttcggccgtgcgtagactggtcagcttccggggtgactagagcagggctgtggtcactttcactggcatctgggtcctgtcgtaggatc

SEQ ID NO: 1265 - DNA, 10558 bp, Homo sapiens
gccatggttgcttgttatccgggcaatggaacgggttatgtacgtcatgttgataatccaaatggagatggaagatgtgtgacatgtatatattatcttaataaagactgggatgccaaggtatgcaacttaattgagcatttatttttttcttacaggtgtctttttctcaaaagcattaagtttcatacttctgataagactgtcacagacacagttaaaaattttcctcttaaatttgtttcagtctcaggtattaggagtggatttttgtaaaatgaaacaaatactactctatgttatacaacatgatacctgtagttaacaacgtagtgttgtgcacttaaaaatttaagagggtagactccatgttcagtgttctaaacacacacacatacacacacacacacacacacacacacgcacacacgaggttaggggaagggaaacggaactttgagaggtgatggatatgtttattaccttggttgtggtgtgtcatgagggtgtgcgtatatatccaaactcatcaaattgtaaatgttaaagatatgcatttttgtatatcagttatacctcaaaaccatataaaaaagtactgatatatcttaaaaagtggattcatttattttcagatgttagagcacttatctaaaatctaacttttttagaaaggtgacctttattaaaatattttccttttaatagtttttagaaaaacatttctgagaacagttgttttataatggcttttgggggagattatctatggataattgttaaggattatttgctatgttattcttggcatttttgtaaaaatattatatggcattgagttgtttaattgaatattggaggcaggattcagtctttccctgattattaaaaaactggaagtttatcagtactgacaagccctgtaaaaccaattagaatgtacaatatatttaatctctcttgttttaaatatatatttccttaatattagcctgagtctcattaaatttaaatgatttttaaaaaatatgtcatatattactacactagagactgtacagactaattttttggttgattttttaaaatcttaagtataacattcaaatagaaaagtggcttgtatagttcagtggattttcacaaagtgaacatacctgtgtagccagggtgcctttttttgttgtttttaagtcaaataacctttaaaaaacctctttctctgcatcccccaaaacacacaaatggaaactgcctgagtcttaaatgtgcaaaaacctaatcctgccctaaaaagtgttttaagtttagaatatgctcacagtgcttcactaatctttctaaaacacactgatttaaagagttttctctgccctagtccaggttcaaaatggagctgacctttctgctgagtatatattgaggcatgtcaacaagcatggtttttctgttacagctttcaaagtttgaagtagagaaataaattttgtaattgaatttgagcccaaggcacaaaacagatgggtgtaactttagttaaaatttaaaaattgactttttttcagattttgtgaatagctagaaagctagaactgtgtttcatcagcttctaacttctagattttgttaggctttttctaggctgatcttataatttctataatacttagtcagggtcattaatgtgtaggttttaaattaggacataggcagagaaacgtccctagtgtttttgtgtgtagaatagaaattttccatgctagattgcactgaatatgtagtgtgtcagttgttctggatgctagggatgtagcagaaacggaattagccctggcagagcttaggatctattggaggatacagatcagaaagattgacagttacagatagttatgcaaagtgtcaagacagattgctatggagcacacaggagggccacctaattcagaggaggaagagtggaagtgtcaagtagccatttcacttaaaacattttcagcaggtcacctgtggtactcccaatgacttgagtcaaagggaagggagcaggaaaaaaggaaagaagacatgttctcagtttggaggttctttagatgtttgcatagtagcctggggaatcactctgaacaacactggaacctgaggaaggttggcaagggtatcaaagtagctagaatttaacttacctgacagtgagcctgataaaccttttctttaactatagattctaggtttaggctcaaacgccatgttgtcctgaccaggtgttagagtttctttaaattttaagagtctacctgcttaggagtgtagttattcaagagtaaggagctacttggttggttgggttttgcctatccccagatcgtaaaccccgcaaggacaaagtctgtctgcattattccctactctgcacccagagcccaccacagttcccagtgcgatttgatgcctagttggtgtttaggtaaataataatcctttatgggtagaatcaagtttcacaagcaggtagtcatctgtgcatcaggcccagtctggaaagggagagccacaggttctaatgaactatatgctgatggtgatggtgacgacgacaataatgatggtcataataaatgatgacactttctactgatatactgaattatttaagtaagaggtatttgtgactatcctattgtttattgaattttaaagtatggtaaactatttgacataatttatttctaataataattttgtcaaaatttcttgaaatctatctatttgaagggtgggttaagcaaatcattaacatacaaaaataaacgtttagtagttttaaaagctttcaagcatcattttaagacttttaaattcagataacattcttgtgtttcatcagatatttataaaaatccctaaaatggctggggacagtggctcacacctgtaataccagcactttgggaggccgaggtgggcagatcacctgaggtcaggagttcgagtccagcctggccaacatggtgaaaacccatctctactaaaaatgcaaaaattagctggacatggtggcgcatgcctgtaatcccagctactcgcgatgctgagacaggagaattgcttgaacctaggaggcggaggttgcagtgagctgagattgtgccactgcactccagcctgggtgacagcgagactccatctcaataaataaataaatatccctaaaataagaactaaatttgtccttgcatcagtgcatatacttttaaaattgcagctcatcttcatactttattgagacgtatttgtgaataatccaattaagacattgaaattgtctctttttttccccctaaatttaatcttgtagcatttttggttactcctgcttacatatttggctcttttcctaggtaagtggaggtatacttcgaatttttccagaaggcaaagcccagtttgctgacattgaacccaaatttgatagactgctgtttttctggtctgaccgtcgcaaccctcatgaagtacaaccagcatatgctacaaggtagtattccttttcagaaaaaattggtttagagtatggtaggacaggagggaatctgtagagtaaacgtgaaagctttctaatgagtattttcctgccaggtacttttcacagtcattttaatttgaataattgtataagatttatgttgcacagtcatctgaattcaaataattatataagactcattaacagttagtactaaatgtgtctttctttgcacagccactctgaagaaagggaagcacaggccttcccatctttctagcactctctccgtgctttgtgcatctcttaactactatccatgctttgatttttgtaagagtattttacttgggagagagaaagatcaagaaggaaaagggttttttaaaaggtggtgagggacaacataggaaaatggatacagagtagaaaaatcagaggtaaccagagagtagaagtgaagagaaaaacagaagaaagaaaagtagagaacaggttaccatgtgtgggagttaatgttagaaaaatgatcctattagctttacaaataatgagcatctgtttcattatactttttctacaaggtatttgcaacctattatatttagtgctttatttcaaatgcttttttaaaaaccatttatcctgactcaattaaaatgctctggctgtgaaaacaagatattgtagacattatcatgaaagtaaatatttgtagaaaaatagcacattaaaaaaaaatacttattttttattatggaaaggtcttggaacattctgatagtgagcttccggcattcatttgctgtatctggcttaggagatgctagggtggcaagaagaggcacaggcttagatgcgctgggtggagagttggctttagtaatgatggttgactctaacgacttgattatcagctgtgccttttttcttcctgccttctgaggtgtgttgcctgcatcctaattcacgtactgagtagcaagctaagcaggttgtagctggagattgtaagaaatcctgaatggaaaccaaagaaagactgtcacatcacatgatgtgcccttttcaatcccatgtctcttcccagtggcatcccagtgctgtctctgccccctgctgcttctgtaaagattttctgacacagtaactgcctcatagaccttcctttttatgaaatcctgagtttggtttggttacgtcctttttagatgaataaataacagatacttgggagtttatagtaaataaatgccagatggcatggaggctaagtgctacaggagttgaggaacgaaggtggtgctacattggagagacgggcaagtgcgctttgaagggagaggctcagctggcctaggtgaggagaggcaaggggtgcagtcgtgttagtaaagttctgggggaaaaggcgtagttgttcaagttaaggcatggaaaatcatgcgacgaaaaggattcttgaagtagaatcctattctgatcttatctagaatgggtgataaggctggaaagttagaatgacataaggtaagttgttgatccagatattagaattctgattgctaagtgactaaaagtttagggcatgggcaaaagatacataaaattatgtatctgagccctttcctatttccaaggccacccaaaagtagaagaagccacatggtaagaaaggtagtggaactctggaaagagcagagtctggtctggaagtcaggagacctccttagacctcagctctgtgattcaccagtggtggggtctgtaaacgtcaggctcccagttgtccaaactcccagactctttacttcaaaatacattatgtgatttttcattctgtcatattactggctgtatgtctgataaatgttgccttttcccctgtgtccactggccacaatccacaatatatttgaactaattgctatattctgcccaggaactggtgatttgtagcgtactttcacttcctatagcgtttatacattttccccattatttgtatcagaaagtatgtcttttgtagtatttaataaactagagatgcctcacttattggtggaatgaaatattctaagtcagattttcagaaaaatgaagtttagacaaagtttaaacacaaaacacagtataattgctttgattaaaatccttaaaaattcttagcataatttaactgtcaaggttataattgtaaacatccatcattactctttgctataatgtagtgatgtccccagagactgttgaaactgttagcctgcaatgccctgagtccttttatctgtttcttttctgttcttttagtacttgtgctattgataatgtgctttttctgtaacagccattcttttacccttttattgtctctctttttttttagagggaggctcactctgtcacctaggctggagtgcagtggcatgatctcggctcactgcaacctccgcctccccgggttcaagcgattctcctgcctctcagcctcctgagtagctagggctacaggcatgtgccaccatgcacggctaattttttttttcttttttttagtagagatggggtttcaccctattggccaggttggtctcgaagtcctgacttcatgatccacccacttcggcctcccgaagtgctgggattacaggcgtgagccactgtgcccggcctattgtctctttctgatctgcagttcccttgcaaaaaataagtagttgaaataagtattaagaaagtcacaaaaactcatcaacttcagacatcaattttagtctcccctggttactgtataaataagctgttaaatttatcctttgatatcattccagtttaggcataattttggcattacaagttttaatataccattgcagcaaaataccactttttccccgcagtgtgatcattcttatcctattctaaattttcttttaggtacgcaataactgtttggtattttgatgcagatgagagagcacgagctaaagtaaaatatctaacaggtaaacgtcatttggggccaggatatattggtacagaaataccctgcaatcaggtgatgctttcaggaaactcaagcatagtctttgttaacaccatgaatacttactttttgttttttatcagatttcttatttgcctcattttttaagaagacataagtcatcttcactgttatctttaaccaaaaaaattgtcaaaggatgtggaaaatttgaggcaaagaagtctgagtaaattattcacatacaaactgagttttctgtgattatccttttcagtcaaaggccacttaactctaggtaacggccatatggtttcctctcattcactccttaaattaataccctttccttttcaaatggatgtgctctaaacagtactctaggtcttccatgttaaatgtagacatgaagaaaattaatacaaagaattatgaattcaaatgccaaaatcagtaaatgacacagacatgtagattccatatctgctaatggtgtacataggtcagcactcttgtactgaacctgaagatcctttaattatgccagttccccttctcttccacttatggactgcctctccaagagcagggggtctgtttcccatctgatggaccacttaccttcttttctttaactctactttctatctccaaaaatccactgagtattcacattactgattagctgtgttttccagagccattgctaatcgcacgtcgaccttacataaaaatggaatattcatgcattttctatgtatttttaaagccattatttgtggcacaagctcagtgtgctttcagagacactgaacactctgttgaagaaactcaaatggcttttaaaataaaaagacaaaatcattatctctgtgtagaggatggttttatccttgaaggtttactatttgaaacctcatcacaatagaatgctgagggaagtttttggaagtacaagcgtgatagttctcagatgatgtttgcaaagttgaaatattgtccatactcttaggaattcagtggaatgcagtagcagaagctctctggtgcttagtgaatgaatgaaaattttttttttttttaccttgcaggtgaaaaaggtgtgagggttgaactcaataaaccttcagattcggtcggtaaagacgtcttctagagcctttgatccagcaataccccacttcacctacaatattgttaactatttgttaacttgtgaatacgaataaatgggataaagaaaaatagacaaccagttcgcattttaataaggaaacagaaacaactttttgtgttgcatcaaacagaagattttgactgctgtgactttgtactgcatgatcaacttcaaatctgtgattgcttacaggaggaagataagctactaattgaaaatggtttttacatctggatatgaaataagtgccctgtgtagaatttttttcattcttatattttgccagatctgttatctagctgagttcatttcatctctcccttttttatatcaagtttgaatttgggataatttttctatattaggtacaatttatctaaactgaattgagaaaaaattacagtattattcctcaaaataacatcaatctatttttgtaaacctgttcatactattaaattttgccctaaaagacctcttaataatgattgttgccagtgactgatgattaattttattttacttaaaataagaaaaggagcactttaattacaactgaaaaatcagattgttttgtagtccttccttacactaatttgaactgttaaagattgctgctttttttttgacattgtcaataacgaaacctaattgtaaaacagtcaccatttactaccaataacttttagttaatgttttacaaggaaaaagacacaagaagagtttaaatttttttgttttgttttgtttttttgagacagtcttgctctgttacccaggctggaggggagtggtgcattcttggctcactgcaacctccgcctcccaggttcaagcaatcctcccacctcagcctcccaactagctgggactgcaggcacacaccaccatgcctgactaatttttgtatgtttagtagagacggggttttgccatgttgcctaggctggggtttaagttaaattttttaaaaaactaaagtgactggcactaagtgaacttgagattatcctcagcttcaagttcctaagataagggctttcttaagctttcaggtgtatgtatcctctagatgtagacaataatgtcccatttctaagtcttttccttttgcttctccttaaattgattgtacttccaaatttgctgttatgtttttttcctaatactgtgatctatctgatctgcagacaagaaccttgtctctgttgaagagcatcaaggggagattatgtacacattgaaactgaagtgtggtgttactgacggaatgtgcagtaactcctcagatatctgttaaggcatttcccagatgtgatgccagccttcttacctgtactgaaagatgcttagcttagaaaaaaacaaaacagatgcaaaatcagataattttattttgtttcatgggttttcttatttactttttaaacaaggaaggaatattagaaaatcacacaaggcctcacatacatgttatttaaagaatgaattgggacggatgtcttagacttcactttcctaggctttttagcaaaacctaaagggtggtatccatattttgcgtgaattatgggtgtaagaccttgcccacttaggttttctatctctgtccttgatcttctttgccaaaatgtgagtatacagaaattttctgtatatttcaacttaagacatttttagcatctgtatagtttgtattcaatttgagaccttttctatgggaagctcagtaatttttattaaaagattgccattgctattcatgtaaaacatggaaaaaaattgtgtagtgaagccaacagtggacttaggatgggattgaatgttcagtatagtgatctcacttaggagaatttgcaggagaaagtgatagtttattgttttttcctcgcccatattcagttttgttctacttcctccccttccttccagatgataacatcacatctctacagtaagtgcctctgccagcccaacccaggagcgcaagttgtctttgccatctggtctatagtacagtgcgcggcgttaggccacaactcaaaagcattatcttttttagggttagtagaaattgttttatgttgatgggaggtttgtttgattgtcaaaatgtacagccacagccttttaatttgggagcccctgttgtcattcaaatgtgtacctctacagttgtaaaaagtattagattctactatctgtgggttgtgcttgccagacaggtcttaaattgtatattttttggaaaagtttatatactctcttaggaatcattgtgaaaagatcaagaaatcaggatggccatttatttaatatccattcatttcatgttagtgggactattaacttgtcaccaagcaggactctatttcaaacaaaatttaaaactgtttgtggcctatatgtgtttaatcctggttaaagataaagcttcataatgctgtttttattcaacacattaaccagctgtaaaacacagacctttatcaagagtaggcaaagattttcaggattcatatacagatagactataaagtcatgtaatttgaaaagcagtgtttcattatgaaagagctctcaagttgcttgtaaagctaatctaattaaaaagatgtataaatgttgttgaaacattatggtggttatttccagctgtcttttttgtttttcaatcctttatcatacattggctttccgaatgatccctttcatcagataaagcttttctggcttagtctaggacatttgttataactttttgtaaatgataatgaaggaaagagaacagtaaacataggagttcaacaattttagaaacatccctggggtcattggactgtctgtg

SEQ ID NO: 1266 - DNA, 10554 bp, Homo sapiens
gccatggttgcttgttatccgggcaatggaacgggttatgtacgtcatgttgataatccaaatggagatggaagatgtgtgacatgtatatattatcttaataaagactgggatgccaaggtatgcaacttaattgagcatttatttttttcttacaggtgtctttttctcaaaagcattaagtttcatacttctgataagactgtcacagacacagttaaaaattttcctcttaaatttgtttcagtctcaggtattaggagtggatttttgtaaaatgaaacaaatactactctatgttatacaacatgatacctgtagttaacaacgtagtgttgtgcacttaaaaatttaagagggtagactccatgttcagtgttctaaacacacacacatacacacacacacacacacacacacgcacacacgaggttaggggaagggaaacggaactttgagaggtgatggatatgtttattaccttggttgtggtgtgtcatgagggtgtgcgtatatatccaaactcatcaaattgtaaatgttaaagatatgcatttttgtatatcagttatacctcaaaaccatataaaaaagtactgatatatcttaaaaagtggattcatttattttcagatgttagagcacttatctaaaatctaacttttttagaaaggtgacctttattaaaatattttccttttaatagtttttagaaaaacatttctgagaacagttgttttataatggcttttgggggagattatctatggataattgttaaggattatttgctatgttattcttggcatttttgtaaaaatattatatggcattgagttgtttaattgaatattggaggcaggattcagtctttccctgattattaaaaaactggaagtttatcagtactgacaagccctgtaaaaccaattagaatgtacaatatatttaatctctcttgttttaaatatatatttccttaatattagcctgagtctcattaaatttaaatgatttttaaaaaatatgtcatatattactacactagagactgtacagactaattttttggttgattttttaaaatcttaagtataacattcaaatagaaaagtggcttgtatagttcagtggattttcacaaagtgaacatacctgtgtagccagggtgcctttttttgttgtttttaagtcaaataacctttaaaaaacctctttctctgcatcccccaaaacacacaaatggaaactgcctgagtcttaaatgtgcaaaaacctaatcctgccctaaaaagtgttttaagtttagaatatgctcacagtgcttcactaatctttctaaaacacactgatttaaagagttttctctgccctagtccaggttcaaaatggagctgacctttctgctgagtatatattgaggcatgtcaacaagcatggtttttctgttacagctttcaaagtttgaagtagagaaataaattttgtaattgaatttgagcccaaggcacaaaacagatgggtgtaactttagttaaaatttaaaaattgactttttttcagattttgtgaatagctagaaagctagaactgtgtttcatcagcttctaacttctagattttgttaggctttttctaggctgatcttataatttctataatacttagtcagggtcattaatgtgtaggttttaaattaggacataggcagagaaacgtccctagtgtttttgtgtgtagaatagaaattttccatgctagattgcactgaatatgtagtgtgtcagttgttctggatgctagggatgtagcagaaacggaattagccctggcagagcttaggatctattggaggatacagatcagaaagattgacagttacagatagttatgcaaagtgtcaagacagattgctatggagcacacaggagggccacctaattcagaggaggaagagtggaagtgtcaagtagccatttcacttaaaacattttcagcaggtcacctgtggtactcccaatgacttgagtcaaagggaagggagcaggaaaaaaggaaagaagacatgttctcagtttggaggttctttagatgtttgcatagtagcctggggaatcactctgaacaacactggaacctgaggaaggttggcaagggtatcaaagtagctagaatttaacttacctgacagtgagcctgataaaccttttctttaactatagattctaggtttaggctcaaacgccatgttgtcctgaccaggtgttagagtttctttaaattttaagagtctacctgcttaggagtgtagttattcaagagtaaggagctacttggttggttgggttttgcctatccccagatcgtaaaccccgcaaggacaaagtctgtctgcattattccctactctgcacccagagcccaccacagttcccagtgcgatttgatgcctagttggtgtttaggtaaataataatcctttatgggtagaatcaagtttcacaagcaggtagtcatctgtgcatcaggcccagtctggaaagggagagccacaggttctaatgaactatatgctgatggtgatggtgacgacgacaataatgatggtcataataaatgatgacactttctactgatatactgaattatttaagtaagaggtatttgtgactatcctattgtttattgaattttaaagtatggtaaactatttgacataatttatttctaataataattttgtcaaaatttcttgaaatctatctatttgaagggtgggttaagcaaatcattaacatacaaaaataaacgtttagtagttttaaaagctttcaagcatcattttaagacttttaaattcagataacattcttgtgtttcatcagatatttataaaaatccctaaaatggctggggacagtggctcacacctgtaataccagcactttgggaggccgaggtgggcagatcacctgaggtcaggagttcgagtccagcctggccaacatggtgaaaacccatctctactaaaaatgcaaaaattagctggacatggtggcgcatgcctgtaatcccagctactcgcgatgctgagacaggagaattgcttgaacctaggaggcggaggttgcagtgagctgagattgtgccactgcactccagcctgggtgacagcgagactccatctcaataaataaataaatatccctaaaataagaactaaatttgtccttgcatcagtgcatatacttttaaaattgcagctcatcttcatactttattgagacgtatttgtgaataatccaattaagacattgaaattgtctctttttttccccctaaatttaatcttgtagcatttttggttactcctgcttacatatttggctcttttcctaggtaagtggaggtatacttcgaatttttccagaaggcaaagcccagtttgctgacattgaacccaaatttgatagactgctgtttttctggtctgaccgtcgcaaccctcatgaagtacaaccagcatatgctacaaggtagtattccttttcagaaaaaattggtttagagtatggtaggacaggagggaatctgtagagtaaacgtgaaagctttctaatgagtattttcctgccaggtacttttcacagtcattttaatttgaataattgtataagatttatgttgcacagtcatctgaattcaaataattatataagactcattaacagttagtactaaatgtgtctttctttgcacagccactctgaagaaagggaagcacaggccttcccatctttctagcactctctccgtgctttgtgcatctcttaactactatccatgctttgatttttgtaagagtattttacttgggagagagaaagatcaagaaggaaaagggttttttaaaaggtggtgagggacaacataggaaaatggatacagagtagaaaaatcagaggtaaccagagagtagaagtgaagagaaaaacagaagaaagaaaagtagagaacaggttaccatgtgtgggagttaatgttagaaaaatgatcctattagctttacaaataatgagcatctgtttcattatactttttctacaaggtatttgcaacctattatatttagtgctttatttcaaatgcttttttaaaaaccatttatcctgactcaattaaaatgctctggctgtgaaaacaagatattgtagacattatcatgaaagtaaatatttgtagaaaaatagcacattaaaaaaaaatacttattttttattatggaaaggtcttggaacattctgatagtgagcttccggcattcatttgctgtatctggcttaggagatgctagggtggcaagaagaggcacaggcttagatgcgctgggtggagagttggctttagtaatgatggttgactctaacgacttgattatcagctgtgccttttttcttcctgccttctgaggtgtgttgcctgcatcctaattcacgtactgagtagcaagctaagcaggttgtagctggagattgtaagaaatcctgaatggaaaccaaagaaagactgtcacatcacatgatgtgcccttttcaatcccatgtctcttcccagtggcatcccagtgctgtctctgccccctgctgcttctgtaaagattttctgacacagtaactgcctcatagaccttcctttttatgaaatcctgagtttggtttggttacgtcctttttagatgaataaataacagatacttgggagtttatagtaaataaatgccagatggcatggaggctaagtgctacaggagttgaggaacgaaggtggtgctacattggagagacgggcaagtgcgctttgaagggagaggctcagctggcctaggtgaggagaggcaaggggtgcagtcgtgttagtaaagttctgggggaaaaggcgtagttgttcaagttaaggcatggaaaatcatgcgacgaaaaggattcttgaagtagaatcctattctgatcttatctagaatgggtgataaggctggaaagttagaatgacataaggtaagttgttgatccagatattagaattctgattgctaagtgactaaaagtttagggcatgggcaaaagatacataaaattatgtatctgagccctttcctatttccaaggccacccaaaagtagaagaagccacatggtaagaaaggtagtggaactctggaaagagcagagtctggtctggaagtcaggagacctccttagacctcagctctgtgattcaccagtggtggggtctgtaaacgtcaggctcccagttgtccaaactcccagactctttacttcaaaatacattatgtgatttttcattctgtcatattactggctgtatgtctgataaatgttgccttttcccctgtgtccactggccacaatccacaatatatttgaactaattgctatattctgcccaggaactggtgatttgtagcgtactttcacttcctatagcgtttatacattttccccattatttgtatcagaaagtatgtcttttgtagtatttaataaactagagatgcctcacttattggtggaatgaaatattctaagtcagattttcagaaaaatgaagtttagacaaagtttaaacacaaaacacagtataattgctttgattaaaatccttaaaaattcttagcataatttaactgtcaaggttataattgtaaacatccatcattactctttgctataatgtagtgatgtccccagagactgttgaaactgttagcctgcaatgccctgagtccttttatctgtttcttttctgttcttttagtacttgtgctattgataatgtgctttttctgtaacagccattcttttacccttttattgtctctctttttttttagagggaggctcactctgtcacctaggctggagtgcagtggcatgatctcggctcactgcaacctccgcctccccgggttcaagcgattctcctgcctctcagcctcctgagtagctagggctacaggcatgtgccaccatgcacggctaattttttttttcttttttttagtagagatggggtttcaccctattggccaggttggtctcgaagtcctgacttcatgatccacccacttcggcctcccgaagtgctgggattacaggcgtgagccactgtgcccggcctattgtctctttctgatctgcagttcccttgcaaaaaataagtagttgaaataagtattaagaaagtcacaaaaactcatcaacttcagacatcaattttagtctcccctggttactgtataaataagctgttaaatttatcctttgatatcattccagtttaggcataattttggcattacaagttttaatataccattgcagcaaaataccactttttccccgcagtgtgatcattcttatcctattctaaattttcttttaggtacgcaataactgtttggtattttgatgcagatgagagagcacgagctaaagtaaaatatctaacaggtaaacgtcatttggggccaggatatattggtacagaaataccctgcaatcaggtgatgctttcaggaaactcaagcatagtctttgttaacaccatgaatacttactttttgttttttatcagatttcttatttgcctcattttttaagaagacataagtcatcttcactgttatctttaaccaaaaaaattgtcaaaggatgtggaaaatttgaggcaaagaagtctgagtaaattattcacatacaaactgagttttctgtgattatccttttcagtcaaaggccacttaactctaggtaacggccatatggtttcctctcattcactccttaaattaataccctttccttttcaaatggatgtgctctaaacagtactctaggtcttccatgttaaatgtagacatgaagaaaattaatacaaagaattatgaattcaaatgccaaaatcagtaaatgacacagacatgtagattccatatctgctaatggtgtacataggtcagcactcttgtactgaacctgaagatcctttaattatgccagttccccttctcttccacttatggactgcctctccaagagcagggggtctgtttcccatctgatggaccacttaccttcttttctttaactctactttctatctccaaaaatccactgagtattcacattactgattagctgtgttttccagagccattgctaatcgcacgtcgaccttacataaaaatggaatattcatgcattttctatgtatttttaaagccattatttgtggcacaagctcagtgtgctttcagagacactgaacactctgttgaagaaactcaaatggcttttaaaataaaaagacaaaatcattatctctgtgtagaggatggttttatccttgaaggtttactatttgaaacctcatcacaatagaatgctgagggaagtttttggaagtacaagcgtgatagttctcagatgatgtttgcaaagttgaaatattgtccatactcttaggaattcagtggaatgcagtagcagaagctctctggtgcttagtgaatgaatgaaattttttttttttttaccttgcaggtgaaaaaggtgtgagggttgaactcaataacctttcagattcggtcggtaaagacgtcttctagagcctttgatccagcaataccccacttcacctacaatattgttaactatttgttaacttgtgaatacgaataaatgggataaagaaaaatagacaaccagttcgcattttaataaggaaacagaaacaactttttgtgttgcatcaaacagaagattttgactgctgtgactttgtactgcatgatcaacttcaaatctgtgattgcttacaggaggaagataagctactaattgaaaatggtttttacatctggatatgaaataagtgccctgtgtagaatttttttcattcttatattttgccagatctgttatctagctgagttcatttcatctctcccttttttatatcaagtttgaatttgggataatttttctatattaggtacaatttatctaaactgaattgagaaaaaattacagtattattcctcaaaataacatcaatctatttttgtaaacctgttcatactattaaattttgccctaaaagacctcttaataatgattgttgccagtgactgatgattaattttattttacttaaaataagaaaaggagcactttaattacaactgaaaaatcagattgttttgtagtccttccttacactaatttgaactgttaaagattgctgcttttttttgacattgtcaataacgaaacctaattgtaaaacagtcaccatttactaccaataacttttagttaatgttttacaaggaaaaagacacaagaagagtttaaatttttttgttttgttttgtttttttgagacagtcttgctctgttacccaggctggaggggagtggtgcattcttggctcactgcaacctccgcctcccaggttcaagcaatcctcccacctcagcctcccaactagctgggactgcaggcacacaccaccatgcctgactaatttttgtatgtttagtagagacggggttttgccatgttgcctaggctggggtttaagttaaattttttaaaaaactaaagtgactggcactaagtgaacttgagattatcctcagcttcaagttcctaagataagggctttcttaagctttcaggtgtatgtatcctctagatgtagacaataatgtcccatttctaagtcttttccttttgcttctccttaaattgattgtacttccaaatttgctgttatgtttttttcctaatactgtgatctatctgatctgcagacaagaaccttgtctctgttgaagagcatcaaggggagattatgtacacattgaaactgaagtgtggtgttactgacggaatgtgcagtaactcctcagatatctgttaaggcatttcccagatgtgatgccagccttcttacctgtactgaaagatgcttagcttagaaaaaaacaaaacagatgcaaaatcagataattttattttgtttcatgggttttcttatttactttttaaacaaggaaggaatattagaaaatcacacaaggcctcacatacatgttatttaaagaatgaattgggacggatgtcttagacttcactttcctaggctttttagcaaaacctaaagggtggtatccatattttgcgtgaattatgggtgtaagaccttgcccacttaggttttctatctctgtccttgatcttctttgccaaaatgtgagtatacagaaattttctgtatatttcaacttaagacatttttagcatctgtatagtttgtattcaatttgagaccttttctatgggaagctcagtaatttttattaaaagattgccattgctattcatgtaaaacatggaaaaaaattgtgtagtgaagccaacagtggacttaggatgggattgaatgttcagtatagtgatctcacttaggagaatttgcaggagaaagtgatagtttattgttttttcctcgcccatattcagttttgttctacttcctccccttccttccagatgataacatcacatctctacagtaagtgcctctgccagcccaacccaggagcgcaagttgtctttgccatctggtctatagtacagtgcgcggcgttaggccacaactcaaaagcattatcttttttagggttagtagaaattgttttatgttgatgggaggtttgtttgattgtcaaaatgtacagccacagccttttaatttgggagcccctgttgtcattcaaatgtgtacctctacagttgtaaaaagtattagattctactatctgtgggttgtggttgccagacaggtcttaaattgtatattttttggaaaagtttatatactctcttaggaatcattgtgaaaagatcaagaaatcaggatggccatttatttaatatccattcatttcatgttagtgggactattaacttgtcaccaagcaggactctatttcaaacaaaatttaaaactgtttgtggcctatatgtgtttaatcctggttaaagataaagcttcataatgctgtttttattcaacacattaaccagctgtaaaacacagacctttatcaagagtaggcaaagattttcaggattcatatacagatagactataaagtcatgtaatttgaaaagcagtgtttcattatgaaagagctctcaagttgcttgtaaagctaatctaattaaaaagatgtataaatgttgttgaaacattatggtggttatttccagctgtcttttttgtttttcaatcctttatcatacattggctttccgaatgatccctttcatcagataaagcttttctggcttagtctaggacatttgttataactttttgtaaatgataatgaaggaaagagaacagtaaacataggagttcaacaattttagaaacatccctggggtcattggactgtctgtg

SEQ ID NO: 1267 - DNA, 2915 bp, Homo sapiens
ggttgaactcaataaaccttcagattcggtcggtaaagacgtcttctagagcctttgatccagcaataccccacttcacctacaatattgttaactatttgttaacttgtgaatacgaataaatgggataaagaaaaatagacaaccagttcgcattttaataaggaaacagaaacaactttttgtgttgcatcaaacagaagattttgactgctgtgactttgtactgcatgatcaacttcaaatctgtgattgcttacaggaggaagataagctactaattgaaaatggtttttacatctggatatgaaataagtgccctgtgtagaatttttttcattcttatattttgccagatctgttatctagctgagttcatttcatctctcccttttttatatcaagtttgaatttgggataatttttctatattaggtacaatttatctaaactgaattgagaaaaaattacagtattattcctcaaaataacatcaatctatttttgtaaacctgttcatactattaaattttgccctaaaagacctcttaataatgatggttgccagtgactgatgattaattttattttacttaaaataagaaaaggagcactttattacaactgaaaaacagattgttttgtagtccttccttacactaatttgaactgttaaagattgctgcttttttttgacattgtcaataacgaaacctaattgtaaaacagtcaccatttactaccaataacttttagttaatgttttacaaggaaaaagacacaagaagagtttaaatttttttgttttgttttgtttttttgagacagtcttgctctgttacccaggctggaggggagtggtgcattcttggctcactgcaacctccgcctcccaggttcaagcaatcctcccacctcagcctcccaactagctgggactgcaggcacacaccaccatgcctgactaatttttgtatgtttagtagagacggggttttgccatgttgcctaggctggggtttaagttaaattttttaaaaaactaaagtgactggcactaagtgaacttgagattatcctcagcttcaagttcctaagataagggctttcttaagctttcaggtgtatgtatcctctagatgtagacaataatgtcccatttctaagtcttttccttttgcttctccttaaattgattgtacttccaaatttgctgttatgtttttttcctaatactgtgatctatctgatctgcagacaagaaccttgtctctgttgaagagcatcaaggggagattatgtacacattgaaactgaagtgtggtgttactgacggaatgtgcagtaactcctcagatatctgttaaggcatttcccagatgtgatgccagccttcttacctgtactgaaagatgcttagcttagaaaaaaacaaaacagatgcaaaatcagataattttattttgtttcatgggttttcttatttactttttaaacaaggaaggaatattagaaaatcacacaaggcctcacatacatgttatttaaagaatgaattgggacggatgtcttagacttcactttcctaggctttttagcaaaacctaaagggtggtatccatattttgcgtgaattatgggtgtaagaccttgcccacttaggttttctatctctgtccttgatcttctttgccaaaatgtgagtatacagaaattttctgtatatttcaacttaagacatttttagcatctgtatagtttgtattcaatttgagaccttttctatgggaagctcagtaatttttattaaaagattgccattgctattcatgtaaaacatggaaaaaaattgtgtagtgaagccaacagtggacttaggatgggattgaatgttcagtatagtgatctcacttaggagaatttgcaggagaaagtgatagtttattgttttttcctcgcccatattcagttttgttctacttcctccccttccttccagatgataacatcacatctctacagtaagtgcctctgccagcccaacccaggagcgcaagttgtctttgccatctggtctatagtacagtgcgcggcgttaggccacaactcaaaagcattatcttttttagggttagtagaaattgttttatgttgatgggaggtttgtttgattgtcaaaatgtacagccacagccttttaatttgggagcccctgttgtcattcaaatgtgtacctctacagttgtaaaaagtattagattctactatctgtgggttgtggttgccagacaggtcttaaattgtatattttttggaaaagtttatatactctcttaggaatcattgtgaaaagatcaagaaatcaggatggccatttatttaatatccattcatttcatgttagtgggactattaacttgtcaccaagcaggactctatttcaaacaaaatttaaaactgtttgtggcctatatgtgtttaatcctggttaaagataaagcttcataatgctgtttttattcaacacattaaccagctgtaaaacacagacctttatcaagagtaggcaaagattttcaggattcatatacagatagactataaagtcatgtaatttgaaaagcagtgtttcattatgaaagagctctcaagttgcttgtaaagctaatctaattaaaaagatgtataaatgttgttgaaacattatggtggttatttccagctgtcttttttgtttttcaatcctttatcatacattggctttccgaatgatccctttcatcagataaagcttttctggcttagtctaggacatttgttataactttttgtaaatgataatgaaggaaagagaacagtaaacataggagttcaacaattttagaaacatccctggggtcattggactgtctgtg

SEQ ID NO: 1268 - DNA, 1016 bp, Homo sapiens
gatcaaaatacctgtttatatatctgttatttaaagaaaaattttccacagtgttttgttattttccagcgtttcttagaacatttgggaattacactaaaatatagctgggtggattgaagtaaagggcaaatgagtttgagatgaagtttgagatgtgcttttttatatacaaaaagcacatcttccaccttaaacagttgtatgagacctaaatgaaatacagtgtgcaaagtaccttacaatgcatggaacaaagtaggccttcaacgaggattattgccctttcctttaacaatatgatagcataattgcagagagagaaaattggggcaatgagctttgaatagctaacggttttatcagttgtaaatgtgaatcatttggaagcaggagtgttgtcttattaatgacaggtcttattttatagcttagatttaaattaagtcactggtgcaaggcacttcatcagattattttcccaaagtgcaaaagtgcatgtgatccaagaaagagagctgtatttgggtatgaactgcaatgatacatatttatgtcatatctaataacataattgtatgttggattttttcaattagtttataaatattcagaagtaactagtctccattgcttcaaaagataattgtttagacttctcaggtcatgaatttatccctcagattatgtttttggtttgaattttatctgaaccatggcgatgctcaagtatgtaccatgggaccaatgggaccaatgagatgtgtgaagggcatggcctcatgagctggaaatagtttcataagtagaacacactaaatgtcagccacttcacaagatggggagagcctaaacagctgcaagtagctaaagctctttttattgaataattactaaacagttgtcaaaaattattgataatttttgctctgaacaagatgtcattggggtcagaaagttactagatagggccttcattgagattaggatgttttctgccaaaattattccaaatg

SEQ ID NO: 1269 - DNA, 1016 bp, Homo sapiens; identical to SEQ ID NO: 1268

SEQ ID NO: 1270 - DNA, 416 bp, Homo sapiens
cagtaaatgacacagacatgtagattccatatctgctaatggtgtacataggtcagcactcttgtactgaacctgaagatcctttaattatgccagttccccttctcttccacttatggactgcctctccaagagcagggggtctgtttcccatctgatggaccacttaccttcttttctttaactctactttctatctccaaaaatccactgagtattcacattactgattagctgtgttttccagagccattgctaatcgcacgtcgaccttacataaaaatggaatattcatgcattttctatgtatttttaaagccattatttgtggcacaagctcagtgtgctttcagagacactgaacactctgttgaagaaactcaaatggcttttaaaataaaaagacaaaatcatta

SEQ ID NO: 1271 - DNA, 1016 bp, Homo sapiens; identical to SEQ ID NO: 1268

SEQ ID NO: 1272 - DNA, 8473 bp, Homo sapiens
gctctacctcccgcggccgggactaccctcagagccgcgaccgccgcggcgtgcgtcccgggcctgcaaaactgtttccaaactgcccgggccggaggcgggcgcgcggggcccggggagatggctggggtctggggggccgagggtgtgtgtggacgctgggagccgcggggggaggccggcgtcgactcagaggagttgcaatcgaggtatctgcgctccggcttcctcctgcggcccgcgaccccctccccggagctgagctggggaagggagaccagggttcaccacgttagcattcgcattcctgggaggatgcagccctcgcctggacctgggcgatagacgccttcttctgtttttatttttggaggggagcgccctgtaattgtcctgaacacatgcttcccccccttcctccagccacccgcggaggagagagtcccccttttttgcatttatcttttccttcccctttctttattaaaggtccgggagtggcggcggccaatcagcgcgcggcttccattttgtgagttcaactccgaggctcccgggcttcgcgaggacgcgtttgcagccccctctgccgctcctctctggcggccgaggcgcaggagccgcctcgccggggctcggagctggtgtagctcatattggggctcttttcggggtttgtaatttggccgtgggtaggtaattggctggagcagggcggcagggcgcggcagccaatcagcgcgcggcttctatagggcttgagttattagacgctgatctcaaaacatccttcatcagacacgaaggagaggccaacagatgagggaagccatttttctgcaatggaattaaatggccaagtgggtttttcctttgttgcaaatggggaatgtttttcctttgactctaccatccagttcaggacgtctcagtgtgtttaacatttgtcaacaggcccaaggactcacagttggaagactggagaagactttttaaaaagatctggatttttccttatgacttggaatccatctttgtcttgtataactaggtcatagcacaccattcatgtcagcagttaacagttttgaattccaaaaaaacctaagtaaatgacatattttttttcctctttttgttctatgggtgggtggggggagcttggagctgtcttaatctgtattctcttgactgaacaataaatttttaaatatatctagtttcctctattaaacacttaaacctggccatcttattaactccttctctctttttaacaaggtaatgttttaaatgtatatagctttaggactagcgaaatggcagcaacaaaaaattgtgagcagttgttactcttttagtttttaaaaaaccttttacattgtaagtacccaatccattctgtcctgacgcagtacagttttgatgttaatgttgctgagatgtccttaattttccgaaccttcatctgcatgtatgtctttgtctctcttgtctaatataagccagttaagatgcttgagacgatcttgctttataaagctaaggttctagctttatgcttttgaaaatgtttacagcactaaatgctagtcagctttcttccccgtagcttgtacactttctttgaaaatcgatctatttgaagaaaaacagccctgtttttctcgtctttggtgttgggggttggggggagctggtgggtgagggaaaggaagaccttttctttgtgtagagagactaaagccgtcacaggaaactagattaaaactggaaaacaagtcctagctggttccagcaaacaccaacgttaagtggggggtattttctatggtggttgggcggctggtgcgtcttgtgccttttgtttgatttgactgtattttcgccttttgtctcttaatgacgatcacaccattgctatatccagagcagtaaacagtcctcagcgaagccgcctttttgcctacccaaccctggaaagtttgcagaagtggaaggagcagaacgtgagggtgtaacttacaaaaaggtaataagaacaaagacaccaccataacccccaaatttcccaactaaatcaaaaaatatatatgtttttacaataacgtctccaaaaccaccgcccagcttgatcttctagactccatggcaccgggctgagcgggtaagtaagaaagataaaaagtgccttttgccccttcgaggaaacccttttgcaggccaagcaagggctgcaagtgtttgggagctgagaggagaaggaggattctggagcattgtatttggcagccggagcgggcagtgggcggggggttgggacacgaagggctcttcggacccctgtgcctcttctgccccaagggcgagaagacgggcttcgcagcgaccctcgggggtccatggagccgcctgccttcgccccctcgctcttcccaggtctgaacctggatggggagaagaaattgaagtgctttggagacgggggggcttaaaacactagggagcctcatcgcccagccttgggcccactttcctttcgatcgtgaggattccgcaccccgaagccggcttctcggggctccggggcgcgcctgcgctggcaacgcgaaggaggacaaaaggccggcgtccatgttggcaccatgacgcagcatctccgcccgcagcccggagctgctgtcctcccggccgcgctcgctcctcctcccaaacaccagttttctttacaggcttcgagcccgtcgcggctgggccgggctggtctggcaggcgggcccagccgggcagggctgctttgctaatggcggcggctctctttccttccttcctcctttcctccgtccccccggtcgtggggagcccggagcaggaggcgggcccgcggccaggtcgggccccgagagcccgcggggcgcagcgctggcgaccgggtgtcgggggccgtttcgggggccgtgggcctcgggggcgtcgcgcgccgcgcctcccgcgctcgcctcagccgggcgcggcggcctgatgggcgccatttcgcgcgctgcccgtggctggggcggtggcggccgccgcgcgccgggcgggaggagcggcaggggtagggggctgggcgacccggcggcccacgcgggcaccaggaggcctcgccccggaccgcttccctctttcgtctttgtcctgcgcgggcgcccgcagccgagggccacggggtcggcggggcttcgaggccgccccgggtcccaccggctcctccggaagccgcggaccggcctggccctgaccccaggccgccccccgctgcccacccagctctgggcgcccaggtccgacctcccagtcgccctctgagagccgagtcagcgcggggcggggggtcgccccctttgtcctcactcagggcgggaggccctcggggtggccgcagacgccccgttgggcagccctccagcccagctctccaggcaggaggtgggggaagcctgggaaagcggagggggggccccgggatcccccgaggcgcggggctcccggcgaagcctcagatctccggcccttcccggggagggtgcgggcggggcgggcctttggaaatgcagatgagccgccgcccgggccggggttgaaccttctgactcagccacccccggccgcccgggccgctgggggaggggcggcgtctggggtgctccctttcagccccggagcccgtctgctgtgtattcggccggtcacatctctctcccccaacgccctgatccgccctccaccttcctctcctccaggttctgggccggagaaggggcgacgttcgggcaccccccgaatggacaatctttccttctgtcaacggcaggggcaggcctagtttgactctgacagtcctcccactaaggtaggtgtgagtacttgcccagaccgtgagggagatttggggggctctggcctgcagcccagggagggccgaaccccaaacacgccgggctggttctgcgggcccggcccaccccacccccccccccccagctgcgagcgcgtagggccgcctgctgggccgccggggccatccatccccgtctgtcagcttctgttgtcaggcatttggggcgtgtaagtctctgccgaatatagcagcatacgagaggatccacttgcaagtatttcccagttgtgtgttcttcggcggggggagggccctgggtgccgcctacttctgaaagacacaggtcactgtcagaaagcccaactgtgctgtggccttccctccagccgcccccgtggggcatgtggggtgacagtgtgagccgtcctctgatgtctggctgctagagaggcaaagaacagagacccgaggttccggccacctttctctatgaaagggccttccttgacgcttctccaccttcctgggattgttttcttctccagtccccgaatgggcaggcctgtatataagccttgtttctagaaccagacaaagctggatttgaaacctggcgagccattgaacagctatggccttgcgtaagcggtatagcctccaagcctatttctccatctccgaaaacagggctagatcagtggttcttagtctggaaccggcatcagaatcacaccggaaggggggctcactgaaaatggaccaccgggcctggtgcccaagtgtctgattcagtgggttggtccttaggactggcatttctaacaagttcccaggtgaggtgaggctgatgctgtggtctgggaacacattttgagactccagcccctagcctggtaacacctggggttttgacgcagaagtgccacgttccacgcttggcacatagtaattgatttcattctaacgctagccgacttcatgtattgaatagtttcccatctcagtgtctaagaagctccacagctggagatggcggcccttggtctcggagcccccctccttgtgatttctgctttgtgattgctttgatgaaccatttgggtccaggtgctcctgatcacaccacctcccctatttgggacttgtgccccactcccgctgtgagggctacaccgagctttgggggcctgttcggattaacaaggagatcttgctaaaggtatcttggtgctaagttaagggagatagttcgccatgggctaggatctctcagtgctggtgaccttgggtgagtgtctccctgtaaagtgataaggatgcctgctggaaagggtggtgggaggattaagtgcgttaaagaggccctcctcccaagcttttagttggcctccattgtgatcgtggttattgctgggagtggctgcagggggtgggggctgggctgcctcagagcttccccccgcaccagcccacctgctgaagcacgtgtccctgcctcagggcaaaggggaatctggcgctccctgggaaggcggccaacgcggttctcctctggagtggttgagtccagctgcaggcctttccccatccacaggggctgttccatgatggggtcaagatttgggtcacccacccatggtccggggagaagtgactccccaaggtcacaaggccaccaccaatagagccaggatggggttccaggtggcttgacttggcagccagcgcctgtgcccatggcaccccctcaccccagctgtctgggttattttgggcttcctcccgtgccagctgtctgctggcatccctgcccgggactgtctggttggaagtaactggcgtggtgctgttggctcctcctgtgagggccagggctgggtcttcaatccccgatgagccgtgctgggtccagctcctttgctgggagggaagagtgttcctgcccagactccccgctgcccaagtacagcaagagggcgaaagcacctgataaaaattgaggttcacattgttaatatcccaaaagcctcctccttctatactccctgaaacctgttttaaatttggctctgccattgaaccccgttgctctcacgttaccctctgccgcccgagggtgtggcgcctccctttagagtcttcgttgctctccgggtggggtctttactccccacctgctttggataattaagtaattgatgtacgtctccctcccagctgcaccctggagggctccagccagtttctcccctccctggatccaatcagtgagctgttgggtgctcagctgtggtctggatgtggttctcggcacggtgtcgggacccacctggctggactgtacccctctctctctgctttggtccctcttctttctttgtccccccaccatcacctcttggggcagggagggtgaggcagtttgtcctcctgctgctgttcctgctggtccctcgagggcgccccgcccaccggtcacccagcgaacgcggggcggggccgctgctggcgctgggccccagggcttgcagagagagggccacgccagcggaagggccggccaggaggtggcaggacttgccttactactgagtcgccggcatccccgcctcttccggcctctccgcccggagccctagcgtggaacatgacctttcggaccctctgggtggagacacagcctctgcctgggctgtgcagtgaggtggcaccaccatctcaggtcgtctggcccagtgcatctgtagctggcatgtgacttccagcaagctcctgcccctgagcgctgggaggagcaggtccagcaataatttttttttttttttttttgagacagagtttcgctcttgttgcccaggcaatggtgtgatctgggctcaccgcaacctccgcctccagggttcaagcgattctcctgcctcagcctccgagtagctgggattacaggcatgtgccaccacgcccggataattttgtatttttagtagagacagggtttctccatgttggtcaggctggtctcaaactgacctcaggtgatccgcccacctcggcctcccaaagtgctgggattacaggcatgagccaccgcgcctggccggacaataatgttttgagctgttgctgagtctggcttttgtgacgggaacttttagcactcaaggagtggccttgtctctggcctgtccccgagtgctcatgggcagccaaggcctggggactgctcaggcagggtagatgtatttgccaggccagctcccgtccctgggacctcagggagtagcttcatccctgaaggctgagtgtcttctgcctcatgtgggtggcccctctgcagggttctcaggcatccagggaagtgggtgccacagcgttgcctccagcctcactggggctggctggactttgctctgacaacacagcagtggctgggcccctgcaactctccagggctcagtttccctgttggccgcactatggcataggcccctgtgtggacaccgatgagctgaccccacaaatgccacccggccgctcccccaggcttcagtggcctaacagctgttgtgtcaggaaccagcttaaagaatctttcttgctttctcaaactctccaggaattcctggtgactggaagggggagtgactcaggccctcaacctctagcaggtaagggagctacctcctgggtgggcatgcccagttcctcagtgggcccagcgcggcccagcctccgaggaagctctgagcagctggcttggctccgaggtatttttagctacagatccagcccccctccatcaccacaacagtcgagtccaaatcaaacgcgctccaggcaggtggggctggggttctgccagcctcctggccagcaggggtgggtgggcagactggggccagtatcagctgttctgcctggacccaggccgggctgggaaggcacacttgtgcttatttcccgcctccacttctgtgcaagcttgtgctgtcataagcagagatcacagccccatttcttggatggagaaagtggacactgaggtctgaggcttttgaggacagtcaggagccctcctatgggctccagtgatgcactcaccagcttctggtcctcttcttccacctcttagagtgccttggctccctcctgtcgtcctggggaacctcggccccagccctgcctccccagccagtcacagctcctccctggtcaccctgagggagctcagggcccggctggtagctgggttgctctgcttctgtcccccactcctgtggagcctggcaggcaactccatgatctgaccccggttaccttgacagccctgcctggcctcccctctcatggcccagccaccccagaacctgaagaggttttctagctgccgtgcatttgccaggctgggttacccaccctactttccctgcctgccctccagtgctgccaggcctagtgtgccagccagcgctcagccttcagtaaagggttcccctgcttccaacctccattgcactgcttcccctaagactgtgacctcctggaaggctggagcacaactgcctctcaataaacgtgttgcaaaaaaggaat

SEQ ID NO: 1273 - DNA, 438 bp, Homo sapiens
gatcccactctcggccatgctctcgtgcctgtctgccgtggaccggctccaggggggggtccctctgccaccctgtcgactcatctgggtggtgcagagggcagtcagcccgcccagggtgaggagtaagaggaggggtgggggttacgggtaattcagccagcagccctgatagcactgcctacagtaagtgctcaacaaataagctgttttgatcaggggatgggagagttggggggattcctgggatgaaggacatgtggctgctggcaaggaaacgcattttcttacatttcttggtgggtgtggggttatcagtctccaaagctccaggagagggaccaagttgacttcaactagagctactccaacctgcccctccctgacgacgtcttgcgtggttcacgcctctggctcctgccggaaggaggcggccgc

SEQ ID NO: 1274 - DNA, 6195 bp, Homo sapiens
gtgttttctgcatcccctttttattctgtaagttccacctgttatattggctttcctagccccattgcttccgcatcttagctagtcatgctaaatgcttgaagggggaaagggagatacaagatagacaaaaccagtcccagacagatggacagacacggtggtacctcatccatcttctctgaggtcggggttctgtctccaaccaggtccaaggccacctcagctgtctggctcagaagcccagcagggtccggggggcctggctcaggtggaggccgaggcccaaggcccaggtcgagctcctcgtcctcgtcggagtctgggaggggtgttgggctgatatcctccaggccggtgctggaggggcgtgacgaggggggcgtggggccccggaagcctggctgggagttggtgccaaagggggccagtggggagagctgggaggaggaggaggagatggggctgccctccatctgcagctcggtgtccgagtccggctccctcaggaagagcagcttggtgcgctgctccttcagcagcatctcgatgcgcgagtccaggctgtcgtggggtttctctggccctgcaggggacgactccagcgtgggcgtgccagggctgtcacagggctcaggactccagccgaaggtgggccggccgcccagctccatgctgttggtgtcggggggcggcgggccgggtggcgtgcctggcttctccttggccagaggctcagcaggtggcaggggtgggggcgccggtgccctccggaactccccactgtcgcgggccccaaaagcggctgtggcggtgggctcttccgggggtggagggaagtgggccactggggtctgatacggagagaaagcagacttgaatccaggagcaggggttgcttgggcgggtggtggagtgtgggcaaatgtggctgaatcctgtggttgagccttgaacgggggaccgctgctgcccccagtgccgccgactgctccgaacgggaggtccgaggaaccccggaaagcggctgtggccccggccaccgcagtgaccgcgggagaattgtgtacataatgatgttcgtggcggcggttgtaggcgtccgtgaacttgctctcgtggcgccgggccttgaaggtcactgcagggtcctggctgaagaggtatgagggtgtgggctggcggctggagtagctggagtcctgtgagaaaggggtgcccaggcgcggtgtgagcggggtgccctgtccataggagttgggtgtgtccaggcggcagctggaataagctgtgtcctgggagaagggtgtcccaccgctattgggggtgacagaggaggagccggagccacagcctgcagacaggcctccatccttgaggcgcttcagggcatctgacagctaaggagagacagagatgtcagaccactgggggaaaacatgcaatggaacagggctattttcccttctcactctggctgctgggaagctcagagccaaactgctctagaactgcagcataaggaatggaagtgggggagattgaggaggagtgtcaggatggtactaactttttctctaatcttaggggtagccaaatatgttcagggaaccttgagggtcattcctaattccagaggaggcagagaaaaaagaagactgtaacatcttggtttaggctgggattttctttctgcctcaggctgtcagaaatcaaagaccttccaggcaggattatgaccaagaactacaatcttgtgcacgagaggatggccaagggctttgtcctcctagtcacccagtgctttaggatttaaagtgataaacagaggccaggcgtggtggctcatgactgtaaccccagcactttgggaagccgaggcaggtggatcacttgaggtcaggagttcaagaccagcctggacaacatggtgaaaccccacctctactaaccaaaaatataaaaattagccaggtgtggtggcgtgtgcctgtaatcccagctactcaggaggctgaggcaagagaatcacttgagcccaggaggtggagcttgcagtgagctgagatcgcaccactgcactccagcctggggacagactgagactctgtctcaaaaaaataaataaaacaaaaaaaaagtgatgaacaggccagtggcagctagtcagcctgatgccagggaggagctggcatgagactcgccccacgcgagagttgtccctgtgtcctggaaggcagtggtttggaaggagtcagccttgctctggaaggcagggcatgaactctggtttctgggtttaggggtagtggcatgcccaggacaccagacactaaggaccccggaaacagcaatgtttggcatcaacgtggaaaagcgggccagggcaggctctgggtctgtgggaatcacagcctgtgctggggaggggagaagccacaggaaacagaaccaatcccatggagccctactgcaggagcacttgggaaaatggggctctaggccctgctcccaattgtggggggcgtggccaggcttcacaccctcctaggccttggtctccaaagctggagtgaggtgggggtaggctgggggtcccataagagagttggtgaggctttccagaggtggggggcacatcaaagagctggcgatggggcagactgacggccataaacccacctgcagggtctcattcacgattggagagacagcgtccagctcgcccactgggagggtctggggggtgtatcggccagtgaccaacagttcatagaaccgcattcgggtttcccctgtagatgggcaggaaagggggaactcagtgaggttccaggatggggcagcccccacaaggattccaacctgtgtggcaccctggtgggtcccttgtgcccgagaccccagtcctagggaggctgtgtggccctgagttcccacccctctgcacctcgctcagggtccccacctcttcaacaaagctgctgagctgcaccatttttctgatcctgagatccagaagctcatgtctcctggggctgagactcccccaaacccaaacccagaggtgccacccgcgacgcccagcccccccccacccctgcattacctgggccatggcacccacagagccaggtcttcccctttctgctcaatacccaggggcttgcagtaagaggaagggaagcccgtgacacagaagccagagtttgttaaatatctggggccaggtgagcagcagagtttgcaacacgctctagtagcacattactgtgaactccacaggccctgaccaggctgagggccccagggtggcctggggactaccttgggcttgaaccctccacccctcagcagaaggaggcttttatagaccagggcccaggggttatcgatatttatagagcctcagaggcagctgcttacatatgcaaaaaagacacgttcctggagctacactttactggtctctttcttgaaatacaaacttagttggcagtctctgagggcttttgtgttttttttcttttcttttcttttctttttttttttttttttacagaattgaaattttgttgagacctggctgctccttaaaatgtgggcacgtgataggaaaggggttaccatgttcaattcaattatcagggagaaatcgtgctgcagccacccaaggtcctcactgcccccccaacccccagagactgagaagctagggaaaggggtgggagggactgtggactggacagaaaaagagggctgtgccctgagaggaggaacagaaccgggcacaggctcggcaagtgtgcgtggaataactgccaccaccccccggcaccggcttagagctcggtcaatacattttaatcattaaacgcaaaaaaagaaaagttctgattttcctgccttgggtttggtgtgtcccagttgtccctgaacgccatgctcacaaaattcctggaagctgcacttttgccctcccaggcagggtttcccaggggaccccggtgggctagggaccgaatgacatctccccacaagctggctggccctcaaagcactcggcaccttcttttataggtgggagcttccctaaagaggcctcaggcacactttggggaatgccctcgagtcctccaagccccttggtcctgcaggggcctccgaagacccacagggtgggaggtatggcctccccagccagctccagagagcacctagctgattccagagcaggggaggtgctgcggtctctttaagagagaggagggaagacacagtgtcaacccttgagcacccagagccgcctgcctggctcttccctcttcccggctctgctcttccccggcggctctgtcgagaaccttatcaatgaaacaacactcctggccccagattggctgccacttccagaggggaaggggcagcaaggaggtggggggacaccctggatccttagaggactctcttttcagttttcagaccttctcttgatgtatttcaaggcatcctagtggcacttcctcagtcccccacaagtaaacaaactctgtctcctcccctaacacaggcaacactggggactgtctaaacccaagccaccagggctcagagagggggcccgcgggggtgtcagcggtggggaagcctccgggtggtccctaggggtgcggtggccaaggaccggcacatttggtaaattacagactgtctcctagcaacagacaacacatttagctccacgcgactctaccctcaggagggggctaagaaataaggttgtggggggggatcccaaggaagagtgagggggggtcctccccacgctgcaggaagggtggggagggaaagggtcgggctgacaggtctccccacgctcctcccctgccaggctcacctttggtgtccagctccacgtggataatgttgcccatgacggaagtgctgtgcaagtgctgaacggcatccttggctccccggaccgtggcaaagaccaccttggcgatgcccaggtgcttcttggtcttggggttgtacaaaatctccacctcctccacctccccatacttcttgcacatgtccctcaggaagttttcacggatgttatcattcagcttggcaaatgtcacctgcttcggaggcaccgggcccacgtagaactcatcgatctggcaggggccgagggggaagggagtttgaagaacgtttaaacctaagggaaaacacaacatcccccccgccccgcccgcaactcgcccacccgttgaaaacaataaagggtaaaaaaactaaaaattaaaaaaaaaaaaaaaattttttttggaaaaaaaaaatgcacgcgggcgggcccgggaagcggaggattaaatcgtttggaacgtggaagtcctctgggttcggaaggaaaggggaaaaagaaacagtttctctttccccacccccctttctggccttctcttcctgctgccgggtcaggggcgacccctcaggcttaagaagttgtcctgtagtgggctagcgagaggggagagtctcggagccgagccccccgcggggcgtgcaggacactgtatctgcgccgtgattacagtttcacccagtgttattttgttttcagtagctgagaggggacaccctctcgccagcgctctacccctccccgccaaaacttccctggccccggacggcgggaactgggaatccggctgggctcggtcaggactggcgttattttcgaactcggggaggtgggggagggacggcggggcagtggggaggggtcctaccttgaatttgggcaccgacagctccagctccttgtttttggtccagatcccgacgacccggggatcttcgacaatttccaccgggcggttgctggacatctgtggggagaaattggggggccgggatgagagaactggtccccctccccatgggcagacccctttctcgaggcacttgtcaaactccagggctggggccccgtctgacagttggccgggggatcgggcggggggtccctggccgctaggcgcgtctccccggacacgacgcggggcacggctgggggggcgcgccggctactcaccgccaggctgaaatgctgcccatcgtagcggtacagtttatgatgcccctttttcagagccgggtcaatcatcaacttgtaacttctccaatggtggttcctcc

SEQ ID NO: 1275 - DNA, 1121 bp, Homo sapiens
gtcttgatcttgttaccgaaatgcattctgtgtaatttcaacgtagactacgttcctgagtctgatgatgtcattgtaaataatcattcctcatgttgctctcacgggtttgacattggaggatagatgtgccatcaactttaaatagagtttccatcttttgtcagctctgcatgtcatacagcaagatggaacacaggttgcaagaaagaaccaacgttattcctgacattctattgatgtgttttgagcagcaatgtgtaaccaggtgtttctgcttctaatcttgattctgctgatgaccatttttatactttatggcaaagcctcattgcctcagtttcctgtctggaaaatgagttcatcatctacctcttgggcaattgagagttttcattttgtgtcttttaaacatctggaaaatggaaaacactgagggctaaggataatgatattgtttaatgtaatttgtcatcagaccggcctcctgctcactatttctttttttttagatgctgtttttttagaatattaaattaaaggagtgctgttaatatgtaatcttcaactagttccatggaggaaagtgatgttttatgaattagagcttaaattcctatctaatttctgaagactgcattcttttcaaagacttgaaattaaactcaggaggatacattttgtttgttctagggggaaacgtaatagaatggtatgagatgaattctatccttttacaataattattactataatattgaagtattctatgcctttctgaaacactttattcagaaaagatcattttttggcttccttttaaaaataagcttgaagtagggaagcatttgcttcttagattttaaatgtagtcttattatgctgaggaaaatctttagttgaaagaataattcattacagatttttgatgaagggaagaaattaattatgttgctggaagactgtctacaaataatcaaaatatttaaatgtaatgtattcaagttgttattaaaaagttactgaatgttatctgaagatgtgaaatgtgtagtcaagtaaaaagttggcgtatactttcttgggctgcatatccaatttaattaaaaaattaaatctca

SEQ ID NO: 1276 - DNA, 1121 bp, Homo sapiens; identical to SEQ ID NO: 1275

SEQ ID NO: 1277 - DNA, 498 bp, Homo sapiens
ttgcctaactgctgttgcccacgttgaagctaaagagtaaaaacctattcatgaacaaagaaggcaggtgagacccggtaacaaactgtctctcttcccactttctctttcttattaatttggcaggatctcccttcccattttgtcaacatggttgaatttgtgtgttggggttgttagggcatgggaattcctggtttgctttctctattgcatgcttgttcatgttaactctttggggagcagaatgagatacatatgcatccatggttatgatggaaaaaagcatgcaaaatccatttttagagagagagagaaagagaaaggtgggggtgggggagcacaaagatcagaagagtactatgctgatattcaagatatagtacagatagctttctgtgtacctatccatctacctattcatctgggctattgattgactcccacagcagtaaagaataattacgcagttattcttctggttatgttttaatttca

SEQ ID NO: 1278 - DNA, 498 bp, Homo sapiens; identical to SEQ ID NO: 1277

SEQ ID NO: 1279 - DNA, 3200 bp, Homo sapiens
gttgtttttcagcatattctgtctttctcctcagtcaaggaccaacctaccttttcttttctagtgctgaggaatgtaaacaagtttgctgggccttgcgagacttcaccaggttgtttcgatagctcacactcctgcactgtgcctgtcacccaggtgaggatacatagttcccagcttttgtccggactgtcggactgttggggatgcctgggaatggggataggttttaatgcctatcatgggaccagtcttatagctagagtcagggaaggactcagcagtttaactgtggtgaacagctggaatatacagggcccggattttcttgggcctgggcagccagtaattgtcagtgtctttggggtaccattttcacctccataagaaagtaactgttacacagtgcattgaaacattttcttcccccttccccttacagacacttctaagatggtaagtgtacatggcaacaaacaaataagtatttttaacctggccactttggcgaaaacaacctcaagttgactgttatatgtggtgccagtctcctaaaactgaccctccagatgtaatgagcaaagagcttattcttatcacttttatgacctgaatgctgaagtgccaggttttgaccagggcaggaggtatgaattgaatatcccttatccgaaatgcttgggatttcggaggaaaaaacactttcagaagtgtttttcaattttggattttttgggattttggaatatttgcagaatgcacaccagttgagcattcctaatccaaaaatccaaaatccaaaatgctccaatgctcattcgcttgagggtcatatcagcgttcaaaaagtttcagctgttagggatgcttggcccttacaggagaggaggagcatctttggctcccgatgagcacttttctccacgtgctttccgtctcctggttctgaagcaaagcaagaagcttagctgaaaggagtgggtagtagaatttgggtgccagtttcttgatggagagaagaaaggtagctctcctctaagcccaccctttgatgtctcaaggtgagtttcttctcccaggaggcaattcttgatgaatctgtagcactcactggtagtttctgtgttaaatgcattcataggtaaaagtgatgttcagcagtgccttgccacacccaaaatcatttctcaactttgattgttttaatgagtaataatatcatttgggatgtcctggttttgcatggtgtctgggttagctgacattgatacacctcataaggttgctcatggacagctgtaggtgttcatggttaacttttattgtgcccttactgtgtgtcagggcactgttttaagtgttttagatgtattaactaagataatcctcatctgcttttctggatttgttactatttttcccattttacaaatgaggaaattgaggttcaacaatgtttaacaatttgcctgacagttattcgtggagccagaattcacatgtagatattctggtaccagagtcctcactttgaaccactccgcttaatacagtatcctttcgatagcatctaaattggtgttttgttttgttttgttttcaactgttattagtaggcaaagccttctttcaaaataaaatcgacatgaagcctgtgggatttagcagactgaggcaaagcttccctggttgctttggaatgggaggcctggacctgctggctctttgccctcctgacacatcatcccttgtttccacagcacactcagcattggaagcacactgcagacggtgtctcattaaagcagtagctcccttgaacccacaagttaaaacgccagacttttatttatttgtttattttttctgagttcttattggcagacttcagaatgaggtacctgaggaaatatagaaacctctgccttaaggttgattttactaaatgctctattttctggtgcagttattgactgtcttatctcttttgtcaggaatgtcttttttaattagaagacaggaagaaaacaaaaaccagactgtgtcccacaatcagaaacctccgttgtggcagaggggccttcaccgccaccagggtgtcccgccagacagggagagactccagccttctgaggccatcctgaggagttcctgtttgggggtgtgagggaaaatcagcgcggattttaaaaagatggctgtggcctgcccggcgtggtgggaggggagctggtttcctggtgaactttctaaaaggaaaaataattttaagtaaagaaaaaagaaaaaaaaggaagactaaacagaaaccagaactgaaacattcacctggtagcaaatgacacatgcacgcacacacacatacacgcacaagcgccagtgcgcacgtgtacacagaaaaacaaaaggacaagctttctgtgaaacaaaatatttacttagggataatgtggggattcacatgaattaaatagctgcaattggaagaagagggtcagggtcatttgttcaggttttctattgttttgtcctctctttcctctcctacccttccttctctttctctctcccctccttttaaatgcaaatgagtagaaatttcttctaccttccccagctgtttcttcccacctttagagttgtttagacaaggaggagtaagcaaggaacttgttctgctttctatcgtggtcacattggtgatgctcgggacctgccagggtcagaatttatggatatctgaaccctgaccccgttcattctctcagtccacttccaatccacatcagtttgttgtctgccttggagagaagagccaaaactggggtgggcgggtgggtggggagtgcaggatataaatgtgtaagtttttgttttttaaggtttttttcttagtgaattattcacccacagacatgagagaaaaaaagagggagggtgtgtggagaaaaaatgtttacagggctaacaagggatgatgtgtcatttagtatgttactaaaaagtgtggaaatgacttgattttaaggggagggtgaggccgaagagggaagcccaaagcagatcttaatgtttcaaaggagtgcagcccttcacagccatcagatatgagggcactgttctgtctggtgttgtagccatctcaagaacaaatcaacagcaacaaaagagaaagaataaatttttaaaatttaaccagt

SEQ ID NO: 1280 - DNA, 3200 bp, Homo sapiens; identical to SEQ ID NO: 1279

SEQ ID NO: 1281 - DNA, 337 bp, Homo sapiens
tttatttccaaaagtttccttgaacccctaggtaatacctgtttcctccctcttcccatccatccccatttccacataaccactggtttgttttctatcactgtagattagtttgcattttcctgagtttttaataaatggaatcataacagtctgttatggcaattgggctttgagctaatacctgcagagctgtattctaatgtgatagatctggcagtgttgttgatatactgacacttctctgccttttctttgcctgtcactttaactttttcactcctgggcataaatcctcaagctacagaacaataggaattggtgaaacaaatcttcc

SEQ ID NO: 1282 - DNA, 337 bp, Homo sapiens; identical to SEQ ID NO: 1281

SEQ ID NO: 1283 - DNA, 3055 bp, Homo sapiens
ggagtcacctttcctcactaggagctgtttgcttcagcaaagcaggatttgaggagttggggtctgattggggaaaagcttgctgaggtggaggtggcgataagcctggacttgccctcacctcaccccacaggccaggattcgtctttgggtttcagggtgcatgtctgtcttagcactgactgcgtgccaagccctggatgttgatcaggcagacacgggctcagcccttgaggctcacagtgcggtgggttgcacaggcagcggcagctgatccctcttaccgggtctccttctcgggactcccttcagtccacttaccccgtttctgccccccaggccttctctgggcagtgactgtgagggctgacaggaaaggcatgtgcagcgtgcttgtgaggagctcagcacagagggtggggtgagggcatgtgttgctgaagtctgcatcctgaggtgcctgtggcaaaccactcttcccttctgtctcctcagttcagccaggccctggccatccggagctataccaagttcgtgatgggggtaagttgtgccagctgtccttccttcccactgccttgcggacccaagcggggcctaggaggccaaccctggtaatggctggaggcaggtcttggtacagggtgttggcgtggtgtgtccctgctccctgggccggggtgggtcactggcactcaggcctctctgggtttcagattgcagtgagcatgctgacctaccccttcctgctagttggcgacctcatggctgtgaacaactgcgggtaggtgtgcgcccctctacttgccactctacctaccaaggctgtggggtgggggagacccaccgagcccttccagcactctgccccctcccacctgctctgtgtgtaggcttggcctgccaggcaccctggcttccgctgggatttcccagcaccccctggggtaaactgtggtgtcaggggtcagggtgtggatgggtggtagcctgaaggcattccttcttgaagtggctttcccgtggctggctgtcttccactgttctctgcatctacactctccttctccggcaggctgcaagctgggctccccccttactccccagtgttcaaatcctggattcactgctggaagtacctgagtgtgcaggtgagcaagcactggacggcggaggcctttcctgttctttgctacatccttcagctgaaatggttttgtggatgcttcattgcatgcaaagataagtggtttcatggaattcaatattgtgaggagatacttggtatctataaggcatttaagttttcatcttacataatttcagaaaggatttgaggtggctaagtgtgggtttattttaagattatacatcagacaagaccttttcttctttgagtcttaaagactcttaggataaggataagagaactctggcccaggtggcaggtggtaaagcccaagaactgcttctccttcaagtaacatgggctgaaaattcgaggtctgtaaccagttgagctgagttcctgggttgttagggcggctggcattggaaaccgactcctccctcctgcaggacattcctgggcccaggagagcctgtgggtggggctgggccacgtggggaactggcagcagtaccaaccttgggttctcgtgttctgtaccgaagctacctctccgtagctggagctcttgggcccagcagtcaggggtccaggctttggccgagggcagaaccttgccttttcctggccttgatttgcctcgcagtgaaatggggcagtggcccggagggagccagaactctgagtggcctcgaggctgagaagaggacagatgggagggaagcagggaggagagccgcagttcttcccagtggccctggtcagcgtgagtgtgtctcgtcctccctatgagcactgaaagagtcctagaccacttgggctctgaagcaagaggggcaatgagcctcctctctagggctctcctacagagtagccccaaagacacccctgggcaggaaatgaaccgctcccttctgcttcaacacaggcagattctgccctccagggatgtaggccgaggccgtccaccccggagctgggtctttgagctcctggacccttctttgcctgacactggccttcctctcggagggacaaggaagcgtggcctccctttcactcaccttacttttccttctggtccagggccagctcttccgaggctccagcctgcttttccgccgggtgtcatcaggatcatgctttgccctggagtaacctgaatcatctaaaaaacacggtctcaacctggccaccgtgggtgaggcctgaccaccttgggacacctgcaagacgactccaacccaacaacaaccagatgtgctccagcccagccgggcttcagttccatatttgccatgtgtctgtccagatgtggggttgagcgggggtggggctgcacccagtggattgggtcacccggcagacctagggaaggtgaggcgaggtggggagttggcagaatccccatacctcgcagatttgctgagtctgtcttgtgcagagggccagagaatggcttatgggggcccaggttggatggggaaaggctaatggggtcagaccccaccccgtctacccctccagtcagcccagcgcccatcctgcagctcagctgggagcatcattctcctgctttgtacatagggtgtggtcccctggcacgtggccaccatcatgtctaggcctatgctaggaggcaaatggccaggctctgcctgtgtttttctcaacactacttttctgatatgagggcagcacctgcctctgaatgggaaatcatgcaactactcagaatgtgtcctcctcatctaatgctcatctgtttaatggtgatgcctcgcgtacaggatctggttacctgtgcagttgtgaatacccagaggttgggcagatcagtgtctctagtcctacccagttttaaagttcatggtaagatttgacctcatctcccgcaaataaatgtattggtgatttggagttttt

SEQ ID NO: 1284 - DNA, 18038 bp, Homo sapiens
gggagcttcggacccggaagtggcgccctgggctcgcggcggtgccgcggggatggcgggagccggagctggagccggagctcgcggcggagcggcggcgggggtcgaggctcgagctcgcgatccaccgcccgcgcaccgcgcacatcctcgccaccctcggcctgcggctcagccctcggcccgcaggatggatggcgggtcagggggcctggggtctggggacaacgccccgaccactgaggctcttttcgtggcactgggcgcgggcgtgacggcgctcagccatcccctgctctacgtgaagctgctcatccaggtgggggaccagaggcgccgtagggagatgggaggctgatgtgaaggtgacaggccaggatttggaggattggggcgggcagtcaatggcgacggatttggggagaggggtggggacggcgggtttggggggccgagtgggtgggatgggagggaagccgtgagggagttgggaacgcaggggtcacgggttttaggatacagaaaggagaccaaggggttagagtaataacagatacgggagagggtggaaggaacaagcgatttgggggagtgccaaggagggagcgatgggctggaaaaacatatttgggagataaaggagtggggacgatggacttgggatagggaagggagcgaatttggggcgagggaagaagcaatagaattgggggaggggcaagaagtttgggtgaagagatggggaggaaggttgggggcccaggcaaagtgtttagagaatgaggagcacataattggggtagaggggaacggaggctctggatttgatagagatggatttaaaacgtcttggggtggggacaaagtgggcgccagggccagaaatttaggagggaaagaaggacaccagactgggggtggacagaggagacggaggtcttgggttgcattgtgatttaatttggtgggagagtgcgaaggcaaagacttttgcaggggaatgctatcggtttaccggagatgggggctctggatttgatggcgacgacggatttggtaggaggaggggacagggtgacgcgtatggggggaggggaacagatagggccagcattgggggaggggagtggcagcgatttgtctagagaggggagctaggaggaggctttaagcggggaagggggatgacgcatttggaggaggaaatggaagtcatagttggggtcagagagaggaatcacagtgcttgtatctgggcagatgaggagaaggggcacgggagtattgaaattgggcagaagggacagtggagacataggtggcaggataggtagggactaccagaaattgagaccgaggtagggatgtctctggaacagagggatgcataggcacttggcagatttggtggtggccagcaatgcggtacagatgaagtgtgctgcttgaggagtgagctggaatgaagggcgtgtggaggtgtgagaattaggtgggtgtggctgggatgggtacagttttgatgggggtcattaggccagaattttccagttaagaagcttggggggaggaaggtaaaaattgaattggagacccatccaagatttgagttgaggcaggtgggtgtcagattttaccatctttataattgaaccgagagaatgcaaaatacaactggaatgagaaggccttgagaatgagagtaattgaaatctgggatccgaggaatggtaatagatttgtgggtgtgaccaggaatatgacaaggaatgaggagattcagtcaggggcatcaaggtgcctgactagaccctaattgtgacagatttgaaaattgttgatggcggaaggtgtagaccagactggcatttggttgtgatttgggaatgagggctgtcttacagggttaagattgtatttacagcagttgaacttgaagtttgggagataaattggtgctttggacctgagaagtgagggttctggaaactgatggaatgagactgagtgagggctaggattttagggcacaggtgggagagtctgtggagtgaaggatactggagcacaagggctcagtgtgagggaaatgaagaagtggcttcatcatttggatgatggcagatctggtttgaaagaacattgaaatgagggtggtttgggaagggaatgggggaatgaaggacaccaaagcgtgagaagaactagatggtgggcaggtaaggatggatgagccctgttgaaggaccagaggtgcctgtctgatttgaacccagctggtgttgagtgtaacatatattagggtaagatcttcaatgggtatagtttgggaatcagagtaataacttgcagaaaggcaaattactgggagtgggggtgtcaggagtggagtgacagatttggggattgtctagattaggtgcgtaagaatgcagtgccttagattagtgcatgtggctgtcaggtttgggagtcggagattttaagatgacagactgtccctgctggtatctgatatagggccacagcatttgccgtagttaggactgggttaacagatttgaggttgaaattgggtttaatgacttgggaacaaataattaaaacttgaaggcaggaggaatgggggtgagatacagccagtgtgcctatgataacccaatagaagttaagaaaatagattcaacagatttgggagccatggggatatgggataacgttacaaatttaagtatgaaattggggtcagtgggactcccaaatagtgttgactaaactggataaggacagcaaaagagcagttgtggcgatttggagtggaggaataaaggaataccacctgtatttaagagaacacagatcaagacaaaacttaattcagaacaaccttggagcttttaacccagaagggaaaaggtctagaagggaagtactcactgcctgggtcagctgactcacccctttcctcctttgctccactgggtcaaaatttttttcttttaaagacagtccccatcatagaggagtttttaaatttacaatcattaatctgttaggcatctcagaatcagatccataggagatagcctgaactttgaaaagcacttgcttgataaaggcaaaaggggacagggttgatcccaaaaagcactggaagcatacctaatccagtttacaaggtagcgctttctaacttgccacttctactgcctcccacagctgcaggccaaatcctctcccacatgtcagaggaatcgctctggtccatgggcccagctggcctgcttagagggcacagggctggtatcctggccccttgccaagggaggaaggagccttctcactccccacctaggtgctggtctccttgacaccttgcctcctccctggcagcaggggctctcacccctcgacagagacttcctgctcctcacatggatatggatggtccttcacccacccgcgggtttaataaatatttcaggctgggcgcagtggctcatgcctgtaatcccagcactttgggaggccgaggcgggtggatcacctgaggtcgggagttcgagaccagcctgaccaacatggagaaaccccgtctctactaaaaatacaaaaaatttgccgggtatggtggcgggtgcttgtattcccagctacttgggaggctggggtaggagaatcacttgaacccgggaggtggaggaggtggaggttgcggtgagctgagagcacgccattgcactccatcctgggcaacaagagtgaaactccatctcaaaaaaaaaaataaataaataaatatttcagatataagaagcatctgtacagcaagaactatcatagccctacagaaatgagggggtcgttttgtcacagggatgtagggtgattgaggtgagaacgcagctaaggatatgtttgaggagtagctggaatttgaggtaacagtttgctaagcctgggaatgggaggaatagacatggaggtgtctgcagtagatttggtaagaaatttgagtttggggtgcactttggaatagatgacttaatggctgacctgtctgaggtttgggtatgatgtattttcttattgccacatttggaattgaggttggaatgaagtttttcatctggagatgagaataactgagatttgttctgagatgggagtagggtttgcagtacatacaaatggaggtttctctactgggaatatttgggatttgaatgtaagaatgttggggtgtgggtgtgacttggattgtggttggacagtgtctgggaccaggcatttctgttgattgggagtttacgtgctgccaatggttagagacactgacgagctttctggtatgctttgatggggaaaacatgaacaagagccacattagaatttgtgggagaagagttaagcaaagggggcaagaggtgtgaggagaggtggtgaggctgaatcaccacgagactctgagcgtccctttgtctttgttaattctgaaggtgggtcatgagccgatgccccccacccttgggaccaatgtgctggggaggaaggtcctctatctgccgagcttcttcacctacggtgagtgtgcctcccaagcaggaaagcccacaccaacagaaaagaggcctcaggtggggagcaggaccagctggccccggggaactcactgcgcagcatggcacgcagtcgagctggcatggaggaggggatctaagcgtgtacagagaggacatggtgtcggggtgcgagcaggtgaaccatacagctttggtccagctcctctgcctgtagctgccagctgccagcccagacagcaggaggggacagacacaggtgcctgagagaggagccaatctaggacactggtccctattatttctgctgccccgggttgtgcctggaacatgcgtgggggtgatttccttttgtcctgtgagcagcctggccctgctactccagcaggaggcccggggggtcctcttgagtttttttcttttatcccacctgggtgtcttgtttcccctgcattcctcaggcagtgagtggtgctcactcactctggtgtctccatctgttggttacagaatggtgtgcagtgaattgcagcttcacttctgtgtgctgcgtgagtttgggtgggccacttacctgctgtggcctggctgcaccccttgtctgcaaagtaaggtcagcttctcctgcccaggccttcctgcaagctccccaactgtcatcaagaagcccaccttgctgcctctgctgcccatcacctggcccacaggtgccgtctggccagggccttttcatgttcaccctcactgtccctctcccagtccctaccctcaccagatgaccatgatgaaggccttctttaaatgtgccctttttctccgtgttcacagctggagttccattgcaggcaaatcccctccagtttcctgcacctctgctcttacctgtttggttgtctagaatattctccagaatctatctttctgttgagtaacttggggcttggcctctgtcttaccttttccatttcacatgctgttggcagaattgggtgtcatatttctcttccagttttgtccctgtgttgttgagtgcagagtctagggccaggtggaatgtgtcatcttgtgaggaaatgtgtttgtgttgttttttacttaaaaattgtcagcgtagtggagaggggaatgacagaagtaggaaggcaccccaccattgtgtagtgaggcagtatacagagaggtaaggcagccggggcagatggctgcggccctgcacggggctttttctggatctggttgcacgtgctgtgttctgagaggcgaggttagagcccagatcatctctattcatgtgacacagccattcccaaaaggacttagagcagagggaacttgacccccatcttaactgtctcttttgaggatgagcagagttctcaggtgtgcccccagcctggtttatataaatgtagctttaatctaggtgtgagcagatgtctgttggggatctctggacaccaggcctactctggagtcagagaggggacccgccatttggctctctggtacagtgtggacagtgtctgctcctctacttgtcatggctgaaagtactgcagctgtcatgacattctctggtgtagaagaaagaacttcccagagggtttcctggcactgcagaaagacccagaatgagggaggccctgggacccacagaggcccctgcaggcatttcagcacgcctccctccgctctcacttgttcctcagttctctcagaaatggagagaaatgacggtccttattccttctttttttacaggtgggcagatggaagagggtcgatgttttgctcaggatcacaaacagaggtcctgaggctccctctcctcactaggatccaccctcccccaaagcaaattttccttttgcctgttcactctgtgaagagggctccttgccaagtcacccagcatcccctcccctcctcctcctctccttccagcccaccctcatctcaggcaatcacatatacaggtaacaggtgttctcagcctcatgaaaaacccatgctagctgtgacattgaattgctgggctggcagacatctgcggaggagcaaaaggcatatttgcttcttcctgcctctgcgcggtgccagagagctaaagtcatggtctaacagggggagcatgctgtctgagagaatgttctgctagcttccagatgcacaggtttataaaaataccaccctgccatttaaaacatgtttaaaatgttgatagaaaacaatgaatcgtatccttagaaagacagaccctagtgaaagaaacactaactcacacaggtagggtctagcttccataacatttaagtttattctatggaattgttcattggtgctcctgttttagttacttctccatagacttgtttttcccttgactaatcaatgccatctggtgccaggtggtatcctgggtgtagcacagtgacagggtggagactgccctggccgtggcatgtgcagggggcgttcttgagcctgtcttctgggagccctttcttttcctttttccctcctttaggttgaagacttcatcattccctgcgggcagtttctctgtttttcctattttcttttcctcaagaaaaatgtaatttttaagtaacagaattgttttctgtgttgcagcatttaagttgctgagttgagaaatcatggctgagtttgccaagtaaagtttttaaagcaaaaaaaaaaaaaaaaaaaaaaaggagggagggagggaaggaaggaagaaaatatatgaacttgtttgtcagaaatacattttgaggcttttactaaaagaaatgggctagaagacatttgggggttagggcctgactgcttccaggtcctggacagatgttaccttctgtgcctgtagtcagcagttacctgaaggacaagccgagcctggtctgggtgtgtgtgacccaggagtgggtgcccctgaactgggtgtgactcctctgccacctctgttttcttacagccaagtacatcgtgcaagtggatggtaagatagggctgttccgaggcctgagtccccggctgatgtccaacgccctctctactgtgactcggggtagcatgaagaaggtgagcccacacaaagccaggaacagtcgcccgaggtttcctcatactcccagccacccctgcagcagccagttaccctggtcttgcctcctccttcccagaccattgggggcttcactccagccccatgggggagctcccaccccacagttctgctttcccacagctgtgacaccagatagtggctttcttttccccccaagctccagacctggaggttacctgaggtgggcccagccaatagacactgcagaggaaatatttggagctggttcctgccgcccaagtccccgaagagttccatggaagaggcgtagctgaacttggttctttcccttctctgtttcaggttttccctccagatgagattgagcaggtttccaacaaggatgatatgaagacttccctgaagaaagttgtgaaggaggtgggtgttgagagttggagagggagaggtgcgtggaggggagcctgatgatttctcacccccaagttgggcgggtcattgacaagtcgaagagttgggtccttgtgtatgcatgggtgggatggtaagggaagaagccctggcctggatgtgccgggaaccccggaaagccttctcagccattgttgggcctagcctgggacccgacagcactcctgggtgggggactggggagtgggcaacaggtggagccatccttggcagaccgaccccatgtgcagtccctgggacaggtttctccctcctgagcacttgtagctcccctcgagggccagttccagagacaggccgagggtggcgagtccccaccccatgctctcttccagacctcctacgagatgatgatgcagtgtgtgtcccgcatgttggcccaccccctgcatggtaagccaccccccttcccccgagactgtatctaagctggcgtcgggggcgtggggtgaggggcgccccctcgtggactgtacatagacagccgtagacctgttgggaagtggtagtggggttgggggtattctactggaacccacctcactgaggagagattggaattctttccaaagggaggtggggctcttcccaggcagtagaaatggcatgctgtggtcatggggtgtaacagggaatccgaaaggccctcttcctctcctgctctctgaataggccacgttgttcagtggccactctgcacctggcacccggtggctggagcattatgaagtgtggcccaccacatcacctgtgtgtgttttcttttttttcctcagtcatctcaatgcgctgcatggtccagtttgtgggacgggaggccaagtacaggtgggtaactcttgggactggcagagtggccctgttaccctttcagagtcggccagggcaggccgtgctgggattggttgctgcaccttttctgccctagtgctgtgtgagttcagcctgctgcctggcttctgaggaatgtggcagtggcttcaatagtctgtccagggtcattttctcttcgtcatctcttatcaagggcagccctagatgagcctagatgcctttgcagaggggtgagtgggattgtagtcagcttggattaggatttctggccccagagctgattctgccacttaggactgagctggggtctccttttggactcccgaagtaatgctctaacgatttttccggccctcataggctgatagctctttttatcccctatgaagaagccatccaccccatgggcttggggctcatcccttccattgtgtaccagaccctcacctagatctgctgcgtgcagccctgggcaggtgccaggggcatatgtgttgacacggaggtgggtcttggaggcatgtgtgaaggacacacctgggttgcccttcctctcttaagattctcatttcctggggtcggtgttttttgcagctgtcctgcggggccaccatcccaggaagctcagctgccatggtgcctcattttggggtcattaatgggaaattggcccattcccctagactgattatgaggttggtagttgggaccagaagggtataatctggccaccactgttctgagtggtggggccgggcctggcagggctgggatgatctgggaccggggctacccagggctttgccttccactggctccctctgttagtaggttgttattgagcttccttggcatttcacacccaagaacccacagcctgtcctctcatccagcttgtcctctcatctctaacagggtgcagtggccagggcatgagtccccggctccctgctgaggagtgccagatgtcttctcctaggctggttccagtgcctcctcctgcagggccctgtattctttctctgccctctgggaaagtacttctctttgcttactaccccctcctactcttactcttgggcgggcctgtgggctcctctgctagagggttgtttaaccagagataagtgtgagggccgggtaagagaagggcctgccgcctctgcagcagtggcccaagttaggagatgcattcctaaactcctatctcccagaaaacaccagtagaggactgctagtgggctgctcccatgggtggttgggcttccccagtctccatgaactgtgtaaactcctcctcaccctgaacaagcgctctttgcctttctacttggttcttcatggtaatagtcctccccatccctgccaggactggctggatttgagcagaactggtgggctcagccccacaccaacgggtgggcttctggtaggtgactgcatgaccctgtatctctgtcttgccttcttcacagtggtgtgctgagctccattgggaagattttcaaagaggaagggctgctgggattcttcgtgtacgtgagtttatacaccccataactggccacgggcatggctctgctaacaggtgtgtcctcaacctctcagaccgcagctgctggcctgggacttcactacatggccctgccctagcctgagtgctgcagccagctctccagagctccatagcgtgtccaagctgcttagcccttttcaggccatggctcatgtaaaagtggaactgtgtgtctagtacatgggggagatgaactgaccagccccactgggcctcatccagttgtggtgggtgtggggctggtcttcatgagctaagtcactgcatagtccttggcctcactgctaaaacatgactgaaaatctgacttggactgagggtggagctctggaagctcacaggctgaccacagccagtggattctgtttgacattgcttttctgacaaattagttgttgccgttaacatttaagatatgttgcacaaaaatccacatgtctggcatctcttgaaaagccagaaaatcttgtcctgctgagcggttctttctgtagagcatccatcggccaggacccaggacctgcttctttggcagggcacatggtctccgagggccgcagacaccctgtacttcgtcacgtcacatccagtgtacttcacctctaaagaaagcacatactgaaaagactaagttcagaaagaataaggtgcagacagaagccaggcttgatgagttgtattttgatttgccgttttaaggtctaggcagtgacatacatgctgataagtatgtcacaaacgtggtagacacatggtatacaacagtatccgctgtactagatacagggctccatattattcataagaagtctttatatcatggttttcccggtttgtgagatgttttttatttatggccccttgtttaaccaattagtgactacttgtaggtgcatgtgtgtgtatatgatatagaaatatatatacggttctcagcaggaggtgattttgctccccggggaacatcggcagtgtccggagacatcttgtggttgtcacaactggcatctagtgggtagaggccagagacgctgctaaacatcctacagtacacaggacagccccgcaacaaagacttattcagtcaggtgtcgttgcttgcatctgtgatcccagttagttgggattagtctcagtggtttctgcagctgtcaggagaccaaggcgggaggattacttgaggccaggagttcaagaccagcctgagcaacatagtgagacttctgtctctacaaaaatgtttttaaaaattagttggccgtggcggcatgcacctgtagtcctagctacccgggaggctgaggtgggaggatggcttgagcccaggagttggagactgcagtgagctatgattgcaccactgcactccagcctgggtgatagagtgagaccctgtctcttggggaaaaaaaaaattattcagcccaaaatgtcaatagtgccaaggttgagaaactctgatttatattcacacacacacatatatgtatgtgtaagtatttatacatacatatatttgcacatgtacctggtaacaaaccaacatttgtgacatacctatcagcatgtatgtcaccgcctagaccttaaaacagcaagtcaaaaaacaactcatcaagcctggcttctgggttctgtctgtgctttattctttctgaacatagtcttttcagtatgtgctttctttagaggtgaagtaagttggatgtgaggtgacaaagtgcagggcatctgtggccctcagggaccatgtgccctgccaaaggggcagccccgggaccccagccaatggctgctctacagaaacagccacccatcttgaaacactgcacatgaccacctctggcatttttcacactgcgtagttctcttctggtgtttgaataggattcccgcacaacagatgcctactctttgggttctttctccccatgtgattttggaacaggtgatactcatacatgttacagtgcatagaaagcaccaaagggtatagcacaaagtcaatctgagcacaggcagggacgacaagattagaaattgcattcacagaggttccttttattaatactcttcatagatgtattacatatattcttttgagtttttcaaatataagatttttttttttaattcaaaaacaaaaattctgcttctcctcccaggagacagccatccttctcctggcgagcctcccagggcactctgtacctaaacaagcaaacacattgtaaaaaacacaagaggcacatgggactcactgacctcaaactggccttttgccctcagcactgcatcttggggaaccttccttagcagtttatagagctgtttatcctaaaggccatcacttaaaaagttagccctccttgtaaatgcttgcatagaatctttttgatagaatattttcaggggcaaagagaacagatgcattgagcagtgtgtcttctgagagttggttaggtaaagaggccaggagaaaattaccaacacgtcggcactcttattatctgcatttggaaattccaaatttggcagtattcacatcttgatccctggcttctgtggtttgaaaactgcttgagactgttagctaatttatggcatccaaagcggcatagaacacctccccatgggaaaaggagcactatcttcccagtgtgcatagctgctggaccctgcaggcctcctttctaaggctgtgccattggatatgctaagattttgagctcggaacatccctgcctgcttcctgggtgtggagcccccaggaactgctcctctccctctcctgctcatctctgcttaccttgttttttagtggattaatccctcacctcctgggcgatgtggttttcttgtggggctgtaacctgctggcccacttcatcaatgcctacctggtggatgacagcgtgagtgacaccccaggggggctgggaaacgaccagaatccaggttcccaggttggttggaacaaggacttgtccttctttccgtgtgctgctgatgcccagggtctgggacaaactcaaggattctgggattctcagcatcaggccgggagggtgagagaggacctctcattatccctggagtcatctttgtctaaggggagaacggcctcaagaggcgagattccagattagtacccagacctgggaggaattaatggaatgcttgtccctgggcgccttagaaacagaccccagcttatctaaggctgctccgaggcagtgacccaactagggctcaggaagtcagaagatagaccagctaatagtgatcacctcttgacctttgtgtcacgtcttttgctttttaaaacccttttgtgaacgttatggcctttgatctgacggcatcctagttgtgaagggaacagggcaggtataatgttcgtttaccaatacagaaatcgagacccagagatcacaaattctggagaggctctgggctctccagagtcactcagctggaactgacagggctggaattagatccctggccaggccaagggtgcattcctctgagttttttcagatctgctaggaagtgtacagtccgatacaccctcctattttgttagctgtggtctacacagcctagtatacatagacctttcagcaggtcgggtcaggcataggaaggcctggtccttctacacagcacttgttgaggaaggccatccaggtacctgaggggttgactggttctgcctgaaccaagataagaggtagggagcagcgatggctgggaattgcagtgtccagacattctcacagtggggatcaccttcaagaaggatggcattccttcttgaagtggctttccctcccaggaggctaggagggcctggggacgtgtctgccagaatcacctgggtgggaagggggtcatgttcagcatgtgtgtgtgtgtggtacatgtctgttctgtgtggtgaggagtgccccatcccagatgggagcctctgcttgcagggagactggccacttgacctgggcaggtgagtcttcactggcctttcgatgtaagcaaattaaagtggctccatagagacccaccccatctgcaatcacagtggtacattcctgcagttctgccccttctcggggggccttgtgggtgggtaagctgctgctgtcacatacagagcaagggtggccaggagtgcaccgctaagtggtttctcatctaggtgggcagctgtctgaccagaggctgccgtgcttacatcagcaacaacagcagtcaacagatttgtctaaagtgtttttcgagtgcttttctgtatgtggcttaaaggccgaggtgaggctgccgggctgtcaaagccactcaagcagacatctgagcaaatctctgaccaagaacccaggccatcgatctggtgggatggccgctccacaggaagctgagggtgggggagtcacctttcctcactaggagctgtttgcttcagcaaagcaggatttgaggagttggggtctgaagggggaaaagcttgctgaggtggaggtggcgataagcctggacttgccctcacctcaccccacaggccaggattcgtctttgggtttcagggtgcatgtctgtcttagcactgactgcgtgccaagccctggatgttgatcaggcagacacgggctcagcccttgaggctcacagtccggtgggttgcacaggcagcggcagctgatccctcttaccgggtctccttctcgggactcccttcagtccacttaccccgtttctgccccccaggccttctctgggcagtgactgtgagggctgacaggaaaggcatgtgcagcgtgcttgtgaggagctcagcacagagggtggggtgagggcatgtgttgctgaagtctgcatcctgaggtgcctgtggcaaaccactcttcccttctgtctcctcagttcagccaggccctggccatccggagctataccaagttcgtgatgggggtaagttgtgccagctgtccttccttcccactgccttgcggacccaagcggggcctaggaggccaaccctggtaatggctggaggcaggtcttggtacagggtgttggcgtggtgtgtccctgctccctgggccggggtgggtcactggcactcaggcctctctgggtttcagattgcagtgagcatgctgacctaccccttcctgctagttggcgacctcatggctgtgaacaactgcgggtaggtgtgcgcccctctacttgccactctacctaccaaggctgtggggtgggggagacccaccgagcccttccagcactctgccccctcccacctgctctgtgtgtaggcttggcctgccaggcaccctggcttccgctgggatttcccagcaccccctggggtaaactgtggtgtcaggggtcagggtgtggatgggtggtagcctgaaggcattccttcttgaagtggctttcccgtggctggctgtcttccactgttctctgcatctacactctccttctccggcaggctgcaagctgggctccccccttactccccagtgttcaaatcctggattcactgctggaagtacctgagtgtgcaggtgagcaagcactggacggcggaggcctttcctgttctttgctacatccttcagctgaaatggttttgtggatgcttcattgcatgcaaagataagtggtttcatggaattcaatattgtgaggagatacttggtatctataaggcatttaagttttcatcttacataatttcagaaaggatttgaggtggctaagtgtgggtttattttaagattatacatcagacaagaccttttcttctttgagtcttaaagactcttaggataaggataagagaactctggcccaggtggcaggtggtaaagcccaagaactgcttctccttcaagtaacatgggctgaaaattcgaggtctgtaaccagttgagctgagttcctgggttgttagggcggctggcattggaaaccgactcctccctcctgcaggacattcctgggcccaggagagcctgtgggtggggctgggccacgtggggaactggcagcagtaccaaccttgggttctcgtgttctgtaccgaagctacctctccgtagctggagctcttgggcccagcagtcaggggtccaggctttggccgagggcagaaccttgccttttcctggccttgatttgcctcgcagtgaaatggggcagtggcccggagggagccagaactctgagtggcctcgaggctgagaagaggacagatgggagggaagcagggaggagagccgcagttcttcccagtggccctggtcagcgtgagtgtgtctcgtcctccctatgagcactgaaagagtcctagaccacttgggctctgaagcaagaggggcaatgagcctcctctctagggctctcctacagagtagccccaaagacacccctgggcaggaaatgaaccgctcccttctgcttcaacacaggcagattctgccctccagggatgtaggccgaggccgtccaccccggagctgggtctttgagctcctggacccttctttgcctgacactggccttcctctcggagggacaaggaagcgtggcctccctttcactcaccttacttttccttctggtccagggccagctcttccgaggctccagcctgcttttccgccgggtgtcatcaggatcatgctttgccctggagtaacctgaatcatctaaaaaacacggtctcaacctggccaccgtgggtgaggcctgaccaccttgggacacctgcgagacgactccaacccaacaacaaccagatgtgctccagcccagccgggcttcagttccatatttgccatgtgtctgtccagatgtggggttgagcgggggtggggctgcacccagtggattgggtcacccggcagacctagggaaggtgaggcgaggtggggagttggcagaatccccatacctcgcagatttgctgagtctgtcttgtgcagagggccagagaatggcttatgggggcccaggttggatggggaaaggctaatggggtcagaccccaccccgtctacccctccagtcagcccagcgcccatcctgcagctcagctgggagcatcattctcctgctttgtacatagggtgtggtcccctggcacgtggccaccatcatgtctaggcctatgctaggaggcaaatggccaggctctgcctgtgtttttctcaacactacttttctgatatgagggcagcacctgcctctgaatgggaaatcatgcaactactcagaatgtgtcctcctcatctaatgctcatctgtttaatggtgatgcctcgcgtacaggatctggttacctgtgcagttgtgaatacccagaggttgggcagatcagtgtctctagtcctacccagttttaaagttcatggtaagatttgacctcatctcccgcaaataaatgtattggtgatttggagttttt

SEQ ID NO: 1285 - DNA, 13540 bp, Homo sapiens
aggtgggtcatgagccgatgccccccacccttgggaccaatgtgctggggaggaaggtcctctatctgccgagcttcttcacctacggtgagtgtgcctcccaagcaggaaagcccacaccaacagaaaagaggcctcaggtggggagcaggaccagctggccccggggaactcactgcgcagcatggcacgcagtcgagctggcatggaggaggggatctaagcgtgtacagagaggacatggtgtcggggtgcgagcaggtgaaccatacagctttggtccagctcctctgcctgtagctgccagctgccagcccagacagcaggaggggacagacacaggtgcctgagagaggagccaatctaggacactggtccctattatttctgctgccccgggttgtgcctggaacatgcgtgggggtgatttccttttgtcctgtgagcagcctggccctgctactccagcaggaggcccggggggtcctcttgagtttttttcttttatcccacctgggtgtcttgtttcccctgcattcctcaggcagtgagtggtgctcactcactctggtgtctccatctgttggttacagaatggtgtgcagtgaattgcagcttcacttctgtgtgctgcgtgagtttgggtgggccacttacctgctgtggcctggctgcaccccttgtctgcaaagtaaggtcagcttctcctgcccaggccttcctgcaagctccccaactgtcatcaagaagcccaccttgctgcctctgctgcccatcacctggcccacaggtgccgtctggccagggccttttcatgttcaccctcactgtccctctcccagtccctaccctcaccagatgaccatgatgaaggccttctttaaatgtgccctttttctccgtgttcacagctggagttccattgcaggcaaatcccctccagtttcctgcacctctgctcttacctgtttggttgtctagaatattctccagaatctatctttctgttgagtaacttggggcttggcctctgtcttaccttttccatttcacatgctgttggcagaattgggtgtcatatttctcttccagttttgtccctgtgttgttgagtgcagagtctagggccaggtggaatgtgtcatcttgtgaggaaatgtgtttgtgttgttttttacttaaaaattgtcagcgtagtggagaggggaatgacagaagtaggaaggcaccccaccattgtgtagtgaggcagtatacagagaggtaaggcagccggggcagatggctgcggccctgcacggggctttttctggatctggttgcacgtgctgtgttctgagaggcgaggttagagcccagatcatctctattcatgtgacacagccattcccaaaaggacttagagcagagggaacttgacccccatcttaactgtctcttttgaggatgagcagagttctcaggtgtgcccccagcctggtttatataaatgtagctttaatctaggtgtgagcagatgtctgttggggatctctggacaccaggcctactctggagtcagagaggggacccgccatttggctctctggtacagtgtggacagtgtctgctcctctacttgtcatggctgaaagtactgcagctgtcatgacattctctggtgtagaagaaagaacttcccagagggtttcctggcactgcagaaagacccagaatgagggaggccctgggacccacagaggcccctgcaggcatttcagcacgcctccctccgctctcacttgttcctcagttctctcagaaatggagagaaatgacggtccttattccttctttttttacaggtgggcagatggaagagggtcgatgttttgctcaggatcacaaacagaggtcctgaggctccctctcctcactaggatccaccctcccccaaagcaaattttccttttgcctgttcactctgtgaagagggctccttgccaagtcacccagcatcccctcccctcctcctcctctccttccagcccaccctcatctcaggcaatcacatatacaggtaacaggtgttctcagcctcatgaaaaacccatgctagctgtgacattgaattgctgggctggcagacatctgcggaggagcaaaaggcatatttgcttcttcctgcctctgcgcggtgccagagagctaaagtcatggtctaacagggggagcatgctgtctgagagaatgttctgctagcttccagatgcacaggtttataaaaataccaccctgccatttaaaacatgtttaaaatgttgatagaaaacaatgaatcgtatccttagaaagacagaccctagtgaaagaaacactaactcacacaggtagggtctagcttccataacatttaagtttattctatggaattgttcattggtgctcctgttttagttacttctccatagacttgtttttcccttgactaatcaatgccatctggtgccaggtggtatcctgggtgtagcacagtgacagggtggagactgccctggccgtggcatgtgcagggggcgttcttgagcctgtcttctgggagccctttcttttcctttttccctcctttaggttgaagacttcatcattccctgcgggcagtttctctgtttttcctattttcttttcctcaagaaaaatgtaatttttaagtaacagaattgttttctgtgttgcagcatttaagttgctgagttgagaaatcatggctgagtttgccaagtaaagtttttaaagcaaaaaaaaaaaaaaaaaaaaaaaggagggagggagggaaggaaggaagaaaatatatgaacttgtttgtcagaaatacattttgaggcttttactaaaagaaatgggctagaagacatttgggggttagggcctgactgcttccaggtcctggacagatgttaccttctgtgcctgtagtcagcagttacctgaaggacaagccgagcctggtctgggtgtgtgtgacccaggagtgggtgcccctgaactgggtgtgactcctctgccacctctgttttcttacagccaagtacatcgtgcaagtggatggtaagatagggctgttccgaggcctgagtccccggctgatgtccaacgccctctctactgtgactcggggtagcatgaagaaggtgagcccacacaaagccaggaacagtcgcccgaggtttcctcatactcccagccacccctgcagcagccagttaccctggtcttgcctcctccttcccagaccattgggggcttcactccagccccatgggggagctcccaccccacagttctgctttcccacagctgtgacaccagatagtggctttcttttccccccaagctccagacctggaggttacctgaggtgggcccagccaatagacactgcagaggaaatatttggagctggttcctgccgcccaagtccccgaagagttccatggaagaggcgtagctgaacttggttctttcccttctctgtttcaggttttccctccagatgagattgagcaggtttccaacaaggatgatatgaagacttccctgaagaaagttgtgaaggaggtgggtgttgagagttggagagggagaggtgcgtggaggggagcctgatgatttctcacccccaagttgggcgggtcattgacaagtcgaagagttgggtccttgtgtatgcatgggtgggatggtaagggaagaagccctggcctggatgtgccgggaaccccggaaagccttctcagccattgttgggcctagcctgggacccgacagcactcctgggtgggggactggggagtgggcaacaggtggagccatccttggcagaccgaccccatgtgcagtccctgggacaggtttctccctcctgagcacttgtagctcccctcgagggccagttccagagacaggccgagggtggcgagtccccaccccatgctctcttccagacctcctacgagatgatgatgcagtgtgtgtcccgcatgttggcccaccccctgcatggtaagccaccccccttcccccgagactgtatctaagctggcgtcgggggcgtggggtgaggggcgccccctcgtggactgtacatagacagccgtagacctgttgggaagtggtagtggggttgggggtattctactggaacccacctcactgaggagagattggaattctttccaaagggaggtggggctcttcccaggcagtagaaatggcatgctgtggtcatggggtgtaacagggaatccgaaaggccctcttcctctcctgctctctgaataggccacgttgttcagtggccactctgcacctggcacccggtggctggagcattatgaagtgtggcccaccacatcacctgtgtgtgttttcttttttttcctcagtcatctcaatgcgctgcatggtccagtttgtgggacgggaggccaagtacaggtgggtaactcttgggactggcagagtggccctgttaccctttcagagtcggccagggcaggccgtgctgggattggttgctgcaccttttctgccctagtgctgtgtgagttcagcctgctgcctggcttctgaggaatgtggcagtggcttcaatagtctgtccagggtcattttctcttcgtcatctcttatcaagggcagccctagatgagcctagatgcctttgcagaggggtgagtgggattgtagtcagcttggattaggatttctggccccagagctgattctgccacttaggactgagctggggtctccttttggactcccgaagtaatgctctaacgatttttccggccctcataggctgatagctctttttatcccctatgaagaagccatccaccccatgggcttggggctcatcccttccattgtgtaccagaccctcacctagatctgctgcgtgcagccctgggtaggtgccaggggcatatgtgttgacacggaggtgggtcttggaggcatgtgtgaaggacacacctgggttgcccttcctctcttaagattctcatttcctggggtcggtgttttttgcagctgtcctgcggggccaccatcccaggaagctcagctgccatggtgcctcattttggggtcattaatgggaaattggcccattcccctagactgattatgaggttggtagttgggaccagaagggtataatctggccaccactgttctgagtggtggggccgggcctggcagggctgggatgatctgggaccggggctacccagggctttgccttccactggctccctctgttagtaggttgttattgagcttccttggcatttcacacccaagaacccacagcctgtcctctcatccagcttgtcctctcatctctaacagggtgcagtggccagggcatgagtccccggctccctgctgaggagtgccagatgtcttctcctaggctggttccagtgcctcctcctgcagggccctgtattctttctctgccctctgggaaagtacttctctttgcttactaccccctcctactcttactcttgggcgggcctgtgggctcctctgctagagggttgtttaaccagagataagtgtgagggccgggtaagagaagggcctgccgcctctgcagcagtggcccaagttaggagatgcattcctaaactcctatctcccagaaaacaccagtagaggactgctagtgggctgctcccatgggtggttgggcttccccagtctccatgaactgtgtaaactcctcctcaccctgaacaagcgctctttgcctttctacttggttcttcatggtaatagtcctccccatccctgccaggactggctggatttgagcagaactggtgggctcagccccacaccaacgggtgggcttctggtaggtgactgcatgaccctgtatctctgtcttgccttcttcacagtggtgtgctgagctccattgggaagattttcaaagaggaagggctgctgggattcttcgtgtacgtgagtttatacaccccataactggccacgggcatggctctgctaacaggtgtgtcctcaacctctcagaccgcagctgctggcctgggacttcactacatggccctgccctagcctgagtgctgcagccagctctccagagctccatagcgtgtccaagctgcttagcccttttcaggccatggctcatgtaaaagtggaactgtgtgtctagtacatgggggagatgaactgaccagccccactgggcctcatccagttgtggtgggtgtggggctggtcttcatgagctaagtcactgcatagtccttggcctcactgctaaaacatgactgaaaatctgacttggactgagggtggagctctggaagctcacaggctgaccacagccagtggattctgtttgacattgcttttctgacaaattagttgttgccgttaacatttaagatatgttgcacaaaaatccacatgtctggcatctcttgaaaagccagaaaatcttgtcctgctgagcggttctttctgtagagcatccatcggccaggacccaggacctgcttctttggcagggcacatggtctccgagggccgcagacaccctgtacttcgtcacgtcacatccagtgtacttcacctctaaagaaagcacatactgaaaagactaagttcagaaagaataaggtgcagacagaagccaggcttgatgagttgtattttgatttgccgttttaaggtctaggcagtgacatacatgctgataagtatgtcacaaacgtggtagacacatggtatacaacagtatccgctgtactagatacagggctccatattattcataagaagtctttatatcatggttttccggtttgtgagatgttttttatttatggccccttgtttaaccaattagtgactacttgtaggtgcatgtgtgtgtatatgatatagaaatatatatacggttctcagcaggaggtgattttgctccccggggaacatcggcagtgtccggagacatcttgtggttgtcacaactggcatctagtgggtagaggccagagacgctgctaaacatcctacagtacacaggacagccccgcaacaaagacttattcagtcaggtgtcgttgcttgcatctgtgatcccagttagttgggattagtctcagtggtttctgcagctgtcaggagaccaaggcgggaggattacttgaggccaggagttcaagaccagcctgagcaacatagtgagacttctgtctctacaaaaatgtttttaaaaattagttggccgtggcggcatgcacctgtagtcctagctacccgggaggctgaggtgggaggatggcttgagcccaggagttggagactgcagtgagctatgattgcaccactgcactccagcctgggtgatagagtgagaccctgtctcttggggaaaaaaaaaattattcagcccaaaatgtcaatagtgccaaggttgagaaactctgatttatattcacacacacacatatatgtatgtgtaagtatttatacatacatatatttgcacatgtacctggtaacaaaccaacatttgtgacatacctatcagcatgtatgtcaccgcctagaccttaaaacagcaagtcaaaaaacaactcatcaagcctggcttctgggttctgtctgtgctttattctttctgaacatagtcttttcagtatgtgctttctttagaggtgaagtaagttggatgtgaggtgacaaagtgcagggcatctgtggccctcagggaccatgtgccctgccaaaggggcagccccgggaccccagccaatggctgctctacagaaacagccacccatcttgaaacactgcacatgaccacctctggcatttttcacactgcgtagttctcttctggtgtttgaataggattcccgcacaacagatgcctactctttgggttctttctccccatgtgattttggaacaggtgatactcatacatgttacagtgcatagaaagcaccaaagggtatagcacaaagtcaatctgagcacaggcagggacgacaagattagaaattgcattcacagaggttccttttattaatactcttcatagatgtattacatatattcttttgagtttttcaaatataagatttttttttttaattcaaaaacaaaaattctgcttctcctcccaggagacagccatccttctcctggcgagcctcccagggcactctgtacctaaacaagcaaacacattgtaaaaaacacaagaggcacatgggactcactgacctcaaactggccttttgccctcagcactgcatcttggggaaccttccttagcagtttatagagctgtttatcctaaaggccatcacttaaaaagttagccctccttgtaaatgcttgcatagaatctttttgatagaatattttcaggggcaaagagaacagatgcattgagcagtgtgtcttctgagagttggttaggtaaagaggccaggagaaaattaccaacacgtcggcactcttattatctgcatttggaaattccaaatttggcagtattcacatcttgatccctggcttctgtggtttgaaaactgcttgagactattagctaatttatggcatccaaagcggcatagaacacctccccatgggaaaaggagcactatcttcccagtgtgcatagctgctggaccctgcaggcctcctttctaaggctgtgccattggatatgctaagattttgagctcggaacatccctgcctgcttcctgggtgtggagcccccaggaactgctcctctccctctcctgctcatctctgcttaccttgttttttagtggattaatccctcacctcctgggcgatgtggttttcttgtggggctgtaacctgctggcccacttcatcaatgcctacctggtggatgacagcgtgagtgacaccccaggggggctgggaaacgaccagaatccaggttcccaggttggttggaacaaggacttgtccttctttccgtgtgctgctgatgcccagggtctgggacaaactcaaggattctgggattctcagcatcaggccgggagggtgagagaggacctctcattatccctggagtcatctttgtctaaggggagaacggcctcaagaggcgagattccagattagtacccagacctgggaggaattaatggaatgcttgtccctgggcgccttagaaacagaccccagcttatctaaggctgctccgaggcagtgacccaactagggctcaggaagtcagaagatagaccagctaatagtgatcacctcttgacctttgtgtcacgtcttttgctttttaaaacccttttgtgaacgttatggcctttgatctgacggcatcctagttgtgaagggaacagggcaggtataatgttcgtttaccaatacagaaatcgagacccagagatcacaaattctggagaggctctgggctctccagagtcactcagctggaactgacagggctggaattagatccctggccaggccaagggtgcattcctctgagttttttcagatctgctaggaagtgtacagtccgatacaccctcctattttgttagctgtggtctacacagcctagtatacatagacctttcagcaggtcgggtcaggcataggaaggcctggtccttctacacagcacttgttgaggaaggccatccaggtacctgaggggttgactggttctgcctgaaccaagataagaggtagggagcagcgatggctgggaattgcagtgtccagacattctcacagtggggatcaccttcaagaaggatggcattccttcttgaagtggctttccctcccaggaggctaggagggcctggggacgtgtctgccagaatcacctgggtgggaagggggtcatgttcagcatgtgtgtgtgtgtggtacatgtctgttctgtgtggtgaggagtgccccatcccagatgggagcctctgcttgcagggagactggccacttgacctgggcaggtgagtcttcactggcctttcgatgtaagcaaattaaagtggctccatagagacccaccccatctgcaatcacagtggtacattcctgcagttctgccccttctcggggggccttgtgggtgggtaagctgctgctgtcacatacagagcaagggtggccaggagtgcaccgctaagtggtttctcatctaggtgggcagctgtctgaccagaggctgccgtgcttacatcagcaacaacagcagtcaacagatttgtctaaagtgtttttcgagtgcttttctgtatgtggcttaaaggccgaggtgaggctgccgggctgtcaaagccactcaagcagacatctgagcaaatctctgaccaagaacccaggccatcgatctggtgggatggccgctccacaggaagctgagggtgggggagtcacctttcctcactaggagctgtttgcttcagcaaagcaggatttgaggagttggggtctgaagggggaaaagcttgctgaggtggaggtggcgataagcctggacttgccctcacctcaccccacaggccaggattcgtctttgggtttcagggtgcatgtctgtcttagcactgactgcgtgccaagccctggatgttgatcaggcagacacgggctcagcccttgaggctcacagtccggtgggttgcacaggcagcggcagctgatccctcttaccgggtctccttctcgggactcccttcagtccacttaccccgtttctgccccccaggccttctctgggcagtgactgtgagggctgacaggaaaggcatgtgcagcgtgcttgtgaggagctcagcacagagggtggggtgagggcatgtgttgctgaagtctgcatcctgaggtgcctgtggcaaaccactcttcccttctgtctcctcagttcagccaggccctggccatccggagctataccaagttcgtgatgggggtaagttgtgccagctgtccttccttcccactgccttgcggacccaagcggggcctaggaggccaaccctggtaatggctggaggcaggtcttggtacagggtgttggcgtggtgtgtccctgctccctgggccggggtgggtcactggcactcaggcctctctgggtttcagattgcagtgagcatgctgacctaccccttcctgctagttggcgacctcatggctgtgaacaactgcgggtaggtgtgcgcccctctacttgccactctacctaccaaggctgtggggtgggggagacccaccgagcccttccagcactctgccccctcccacctgctctgtgtgtaggcttggcctgccaggcaccctggcttccgctgggatttcccagcaccccctggggtaaactgtggtgtcaggggtcagggtgtggatgggtggtagcctgaaggcattccttcttgaagtggctttcccgtggctggctgtcttccactgttctctgcatctacactctccttctccggcaggctgcaagctgggctccccccttactccccagtgttcaaatcctggattcactgctggaagtacctgagtgtgcaggtgagcaagcactggacggcggaggcctttcctgttctttgctacatccttcagctgaaatggttttgtggatgcttcattgcatgcaaagataagtggtttcatggaattcaatattgtgaggagatacttggtatctataaggcatttaagttttcatcttacataatttcagaaaggatttgaggtggctaagtgtgggtttattttaagattatacatcagacaagaccttttcttctttgagtcttaaagactcttaggataaggataagagaactctggcccaggtggcaggtggtaaagcccaagaactgcttctccttcaagtaacatgggctgaaaattcgaggtctgtaaccagttgagctgagttcctgggttgttagggcggctggcattggaaaccgactcctccctcctgcaggacattcctgggcccaggagagcctgtgggtggggctgggccacgtggggaactggcagcagtaccaaccttgggttctcgtgttctgtaccgaagctacctctccgtagctggagctcttgggcccagcagtcaggggtccaggctttggccgagggcagaaccttgccttttcctggccttgatttgcctcgcagtgaaatggggcagtggcccggagggagccagaactctgagtggcctcgaggctgagaagaggacagatgggagggaagcagggaggagagccgcagttcttcccagtggccctggtcagcgtgagtgtgtctcgtcctccctatgagcactgaaagagtcctagaccacttgggctctgaagcaagaggggcaatgagcctcctctctagggctctcctacagagtagccccaaagacacccctgggcaggaaatgaaccgctcccttctgcttcaacacaggcagattctgccctccagggatgtaggccgaggccgtccaccccggagctgggtctttgagctcctggacccttctttgcctgacactggccttcctctcggagggacaaggaagcgtggcctccctttcactcaccttacttttccttctggtccagggccagctcttccgaggctccagcctgcttttccgccgggtgtcatcaggatcatgctttgccctggagtaacctgaatcatctaaaaaacacggtctcaacctggccaccgtgggtgaggcctgaccaccttgggacacctgcaagacgactccaacccaacaacaaccagatgtgctccagcccagccgggcttcagttccatatttgccatgtgtctgtccagatgtggggttgagcgggggtggggctgcacccagtggattgggtcacccggcagacctagggaaggtgaggcgaggtggggagttggcagaatccccatacctcgcagatttgctgagtctgtcttgtgcagagggccagagaatggcttatgggggcccaggttggatggggaaaggctaatggggtcagaccccaccccgtctacccctccagtcagcccagcgcccatcctgcagctcagctgggagcatcattctcctgctttgtacatagggtgtggtcccctggcacgtggccaccatcatgtctaggcctatgctaggaggcaaatggccaggctctgcctgtgtttttctcaacactacttttctgatatgagggcagcacctgcctctgaatgggaaatcatgcaactactcagaatgtgtcctcctcatctaatgctcatctgtttaatggtgatgcctcgcgtacaggatctggttacctgtgcagttgtgaatacccagaggttgggcagatcagtgtctctagtcctacccagttttaaagttcatggtaagatttgacctcatctcccgcaaataaatgtattggtgatttggagttttt

SEQ ID NO: 1286 - DNA, 309 bp, Homo sapiens
gagtgtcctcctcctcccgtcctgggaaacctcatccaatgggcaaagctgaaagggcctctgacaggcctttggggacctccttatatatatccttacgtatatacccaagataattggaaacttaacgttcacacaaaaactggtatatgaatgcttagtagtattattcgtagtagctcaggagtggaaacagcctgagtgtccgatgacaaataaaatggaaatgttctatagaatgtaatgaatattccatagaatggaatattacttggcaataaaaatgaatgaagttccgattcatgctac

SEQ ID NO: 1287 - DNA, 577 bp, Homo sapiens
tccgttcaaacagaaacttttattgcgaacccccaaaactagcacggttctgttgtaggtgttgttgcagagtgtcgggcacgtttacaaacaggaacagggcacttgctgtcctatcttcctcgcagggttcttgtgacgattacacttaaatcaacacgtataaagcattttaaaaagtgcctgtcacatagtccctgcaatttaaggtctagttgtgattattcacttgtattaactaagaatcaactacaggcgcctagcagtgcctgcatgtgctcacactgaggcactcactaaaaccctcaggatctagtgagggagacagtcaaatactttagagcaaaacaaattttacaaccacggactctgaggaaggcgtgcgaaggctccacagctggggagggtgcccacagtcgccgaggggacatctggatttgctctggttgggagagcattcctggcagaggagatggaaaatgcgatcggacaaagaggctgggaccgcggaggggatcgggctcggggtcggggctcgtcctgcagcaggagattcagctcgcgcagagttccacgc

SEQ ID NO: 1288 - DNA, 147 bp, Homo sapiens
ggtcccagctactcgggaggcttaggcaggagaatggcgtgaacccaggaggtggagcttgcagtgagccgagatcgcgccactgcactccagcctgggcgacagagcgagactccatctcaaaaaaaaaaaaaaaaaaaaattgtg

SEQ ID NO: 1289 - DNA, 153 bp, Homo sapiens
cccagctactcgggaggctgaggcaggagaatggcgtgaacccgggaggcggagcttgcagtgagccgagatcgcgccactgcactccagcctgggcgacagagcgagactccgtctcaaaaaaaaaaaaaaaaaaaagaaagcagtggggcc

SEQ ID NO: 1290 - DNA, 1433 bp, Homo sapiens
aacagatggaccattgacaatccatatatttagaaatgatcaaacctaatgttttccttttttaagatgaaagtaaacataaatagagatggtatttttttctgcaattctctttttatacatcttatatctctttgcagattacagttctatatttgacttcccataacatgtcacaggacatgtgctttaaatcccccacaagttgttctcttgtggatatagtctaggtcttctgggttgtcccaaaatatgatgtgcacagacacaaacatattctgtatattggttttgattaacacagaatgcagtgggatttccttcctattatcattatatttcccttaatgcagtccaagattatgtattagtgtctaaagaagtataccacattcttaggtcttttagaaagtatcatctgcctctttggactctgggctatctttactaattcatctcaagtattatttttgtctcttcttttcatctaagactaaatattctccactctgctgttctactcagattaatgtatggccatatggcagtagacttctttatacttagtgctttctcaattttaagatgtttgaatattacactgatgcagaagttatttcataagcatagctttttcttgtgtggggtggaaagggaagaggattaaatcactgcctcacttgagcacatacatagctggaaaatgtgtggaaagtttcttgatgttgagaaaaaaagacagtgtcttgttaatcaataaattccgtttatttttcttttactatgtcctttactatatcataactgtagccttgctatatcctgaactcctcacaaaggccttctctgagccaactaaattaatgataaagaattgtaattcttggctgggtgctgtagttcacgcctgtaatcccagcactttgggtcactgaggtgggcagatcacctgaggtcaggagttcaagaccagcctggccaacatggcgaaaccccatctctactaaaagtacaaacattagctgggcatggtggcatgcacttgtagtcccagctactcgggaggctaaggcaggagaatgacttgaaccctggaggcggaggttgcagtgagccaagattgcaccactgcactccagcctgggcaacagagcgagactccatctcaagaaaagaaaaaaaaaattgtaattcttatacccttgctctgcttctttatcattgtgtaattttaaaaacaactgacatatattatacaggtacttgtttattgtctatttctaccactaaaatggaagctccaactgctattagattaatttccctcccaggtccaattttgattatgttactctgaccaagctgatcttttctcttcaatctagaccttttaactaccttcaaaaatacaataaatataattattctagact

SEQ ID NO: 1291 - DNA, 1434 bp, Homo sapiens
aacagatggaccattgacaatccatatatttagaaatgatcaaacctaatgttttcccttttttaagatgaaagtaaacataaatagagatggtatttttttctgcaattctctttttatacatcttatatctctttgcagattacagttctatatttgacttcccataacatgtcacaggacatgtgctttaaatcccccacaagttgttctcttgtggatatagtctaggtcttctgggttgtcccaaaatatgatgtgcacagacacaaacatattctgtatattggttttgattaacacagaatgcagtgggatttccttcctattatcattatatttcccttaatgcagtccaagattatgtattagtgtctaaagaagtataccacattcttaggtcttttagaaagtatcatctgcctctttggactctgggctatctttactaattcatctcaagtattatttttgtctcttcttttcatctaagactaaatattctccactctgctgttctactcagattaatgtatggccatatggcagtagacttctttatacttagtgctttctcaattttaagatgtttgaatattacactgatgcagaagttatttcataagcatagctttttcttgtgtggggtggaaagggaagaggattaaatcactgcctcacttgagcacatacatagctggaaaatgtgtggaaagtttcttgatgttgagaaaaaaagacagtgtcttgttaatcaataaattccgtttatttttcttttactatgtcctttactatatcataactgtagccttgctatatcctgaactcctcacaaaggccttctctgagccaactaaattaatgataaagaattgtaattcttggctgggtgctgtagttcacgcctgtaatcccagcactttgggtcactgaggtgggcagatcacctgaggtcaggagttcaagaccagcctggccaacatggcgaaaccccatctctactaaaagtacaaacattagctgggcatggtggcatgcacttgtagtcccagctactcgggaggctaaggcaggagaatgacttgaaccctggaggcggaggttgcagtgagccaagattgcaccactgcactccagcctgggcaacagagcgagactccatctcaagaaaagaaaaaaaaaattgtaattcttatacccttgctctgcttctttatcattgtgtaattttaaaaacaactgacatatattatacaggtacttgtttattgtctatttctaccactaaaatggaagctccaactgctattagattaatttccctcccaggtccaattttgattatgttactctgaccaagctgatcttttctcttcaatctagaccttttaactaccttcaaaaatacaataaatataattattctagact

SEQ ID NO: 1292 - DNA, 577 bp, Homo sapiens
ctgaggtgatatattttgactatttttgacatatacaacctgcttatgtggtattttttactattaataaatgctaaatatcaaaccttctgtttagctcttagttgacatgaatttatagaccaaggtaaaggttaacacactacattgttataacctatattaacaaagaattaatactcttctatgtaatatttttagcagaattattttgttgaaaagtgccaagtgtttgtttcctctttgttcttcccctttttgttgtaaaattgtttcactttgtagcaaatgatgaaaacattattattttctaagtgttatgcaaatctttataatatcagtatacattaaatatctacctatttagtattctttctctagtaagagcttaccttctgtgcattctgaaatgtacaactttttatgtacaaaaatgtctgttttagcattatgaggaaatgaatgcctatacagtggtctccccttatctatgttcttgtgttccacagtttagttacctgcagtctgaaaatattaagtggaaaattccaaaaataaactacttataggttttaaa

SEQ ID NO: 1293 - DNA, 196 bp, Homo sapiens
aaccccgtttctactaaaaatacaaaaaattagccgggcgtggtggtgggcgcctgtagtcccagctactcgggaggctgaggcaggagaatggcgtgaacctgggaggcggagcttgcagtgagccgagatcgtgccactgcactccagcctgggtgacaaatggggactccgtctcaaaaaaaaaaaaaaaaaa

SEQ ID NO: 1294 - DNA, 577 bp, Homo sapiens; identical to SEQ ID NO: 1292

SEQ ID NO: 1295 - DNA, 196 bp, Homo sapiens; identical to SEQ ID NO: 1293

SEQ ID NO: 1296 - DNA, 4454 bp, Homo sapiens
atgattaatcactaaacaggtattgcataaaatagcaattttcagctctggattttggggaagggagtagaggctggaaatgtaggtggagagtcaggctggggagagatgccacattcgcaacattgggttttttacaatagtactgcatctatctctgtgcaggagtctaaaagtggttggaagctacatttaggattatttaaaataacatactgccttatttttatctctgtagcaacaactttttgtaagaaaaatagctagttccatgatcttttgccttttgaaaaggagagatctattttaaactctttgcaggctcctcgaagttccttttcttgctgttgagtagcaggtagaatctctagttcatggaggtctgacggatccatggtcccgtgctggtccatgtgctgccctctgcttccgtccctcatccttgccactctcaacagtcttccccgacaacccttaggaagacaagggcttggaggagggggaggactgagtgtccctggcatgttctgattaatcctattcattgtcaagtacagctttttaatgaactgattcattactgagagtaggtctcatgcaaatccctagtttgtatcctgtggatttaatttctaacaatttcctcatttcaacacaactccattgtaccatgggctttgtgattttgttctaatatagagcttgacctcacattttaagactataagatgaatactaaaaaaacgaaatccttaaaataaaaaataaactagaagaacatgtaggtggatattcaactcctctctaaaggaagaagggttgtccacacataaaagttttggaagagactgggtttagtggctcacgcctgtaatcttagcactttgggaggctgaggtaggaggatcacttgagcccaagagttcgagaccagcctgggcaacataatgataccctgtctctacaaaaattaaaattagccaggcatggtaatgcacacctgttgtcacctgtggttgggaggctgagtgggaggatcgcttgagcccagaaggttgaggcttcagggagccatgattgcaccactgcactccagtgtaggtgacagagcaagaccctgtctccaaaaaaaaaaaaaaaaaaaaagaaattctggaagaaatgacagaggaaatcactgataaatttcgaaacataagtttgtgcaatatcagagacaaatttaacaaatatgtaaaatttgcctccattatgagttaatataaaactatgaagagttcaggagattataaaaagagacaaagacaaccaggagaaaacagataacttaatactttttaaaaaaacaccaggctaacaaaaaagaaatatatagttgactaaataaatatagcacaatatatttaaccctacaaatttcaactaatgcaatgaaaacataatagcagcttttcaactgttattattaccagaaagaaaaatattttaaaatgctattgtggttttggtgagggaacatttttcatgccctgttgtttgagagtagaattcagtgcaccctttctggaaagcagtttggtaacctgtaatacttcttttaaaaaaaaattcatcctcttgtctaaaaatttctcctctagaaacttaaagataatagtcaagtgaaaacacatttatgggcagtgtttaaagttttgtgagtgaaactgttgataagaacctattacaatggttaagccacctggaacattctattgatatattatgcagccttggaaaatagtacttttaaggaatgttaataagatgggcaatacaaaactgaatgaaaatccaatacagaattctgcctacataacatgatccaaattttgcctaaagtttgcctaaaacgtgcatagcaaaagaatttcgggaactacaccagaatgttagcatgggtccatcatttctgagctgtggtgttactggcatgactcttgtttttcttgtttattcttttatgttatattaaggtgaccacctgttcccgttggcctggtactgccctggttttagcactggaagtcctactctggacaattaatgattcgtgtgtgtgtgtgtgtgtgtgtgtgtgtgtgtgtacacattaaggtgaggttgtgcccatttgaaaggaagggccaaagataaagtgacaagctcatggggcctgtgtggtagtcaggcagtagatttttttttttttttttgagatggagtctcgctctgtcacccaggctggagtgcagtggcatgaacctggctcactgcagcctctgcctcccaggctcaagcgattctcccacctcacctgcccaagtagctgggactacaggcatgcacccccacacccagctaattttattttgcattttttgtagagacggggttttacatgttgcctaggctggtctcaaactcctgagctcaagtgatccactaccttggcctcccaaagtgctgggattacaggcatgagccactgtgcttggcccagggagtagattttctgatgataaaattaacgtgacttgttctagaaaatacagggaaagagtaaatgtgcaaagacttaaatagcatttacatgtagcccacagtgctctaaatgcttttggtggttcacagtttaatcatcataaccctatgaactagatactgttgttgcatccccatttacagaggcatagagacatggagtaattcacccatagccacacagcccttgacagaatctggatttgaactcaggcagttcggatccagagtctgggccattgaccacctcctgcatctctgtagatccccgactccagcctctcctcttgctgcctctctcaacagtaacgatgctgttactccccacgccaaacctctgggctggccaggctcactccagtcccacagtcattgccaggactgcctttgaccttacacagaggaaacatcttccacctgtcgggagggagccggggcggggatttccatggcagagttactgttctctggtgatagagttctttcagttttgctacatggtcttgtggcaaaggactgggtgcaggtgcagccttggttatttctggaaacacttctccttttcttttattttgccaggtctggctcatcagtcaccttcctctcagaaaggtgattttggctcctctgcccagaccatcaaacatttctggaggtgtcacaagcttccgtgagggttctggtctctgcgaattgcaggaagaatccaaacataggaaaggggtgatgtgtatcagggtgtccatcctcagctttgctccacaaagaccctcacacttgcacattgttttgttaacagtattatctctgagtagtgggtttattgtttttgcttacctgttttaaacacttcttcaacaaacttgctttactttccattttttaaaagtgtatttcaattttttattaataatgccattttactcctgcaaaatttctcactccttcaaagtctgtgtatggcaaagatcttcctaaccatcattcaagttagagcaactccatttctgtatcaaaaagaaatacctttagttattgtctgaacttgtcagaatttctgagaacgatgccagaaattctataattgttttgtcacattaattgaacaatgagagggcaccagcattcctcactcatgaggtagaagcaccacatctacatttctttttagctatgggtgatgtttttgcttttaaatcttagaaatctgttaataaacaaataacacaacaaagtttggggtacttccttgtggggactgggatgcttaagctaaaacaaagtttaaatttggactgtgtgtgttatgtttcgcagaatctatatgtttctcaaaagtgggtgtcaccctccttcctcccccaacacacccttcaggggtaagaggagaagtaatgtagaaaaattaactgtttctccactgtaaaagtagggtgtctttagaatgtttcatgttcaaaggaaagattgtgcttctcccaaggcaaggtgttcccttaaaaaaaaaaaaaaaaaaggttgagcatgtctttgtattgctgtctctggaagaggaaatgaggcatctcttggggtgagaacaagggagaattgaactctcgggcctggccagatggattcctcacactggcacagagctgtgaagggaagggcctttcatcctccagaggaaagagggctggggtctcagaggccagagcatagggacaggcaggagtcctgcagccctgatgcctgcccctcccagtacagaatctctgtcctgacccccacctgttgaacctttcaaatcccagtgactcgccagctttctctgtggatattggctgaattggtggcttgtgtggctgcctgggagagcaatttacccctgagccaaggagggggtgggc

SEQ ID NO: 1297 - DNA, 1569 bp, Homo sapiens
cccacgccaaacctctgggctggccaggctcactccagccccacagtcattgccaggactgcctttgaccttacacagaggaaacatcttccacctgtcgggagggagccggggcggggatttccatggcagagttactgttctctggtgatagagttctttcagttttgctacatggtcttgtggcaaaggactgggtgcaggtgcagccttggttatttctggaaacacttctccttttcttttattttgccaggtctggctcatcagtcaccttcctctcagaaaggtgattttggctcctctgcccagaccatcaaacatttctggaggtgtcacaagcttccgtgagggttctggtctctgcgaattgcaggaagaatccaaacataggaaaggggtgatgtgtatcagggtgtccatcctcagctttgctccacaaagaccctcacacttgcacattgttttgttaacagtattatctctgagtagtgggtttattgtttttgcttacctgttttaaacacttcttcaacaaacttgctttactttccattttttaaaagtgtatttcaattttttattaataatgccattttactcctgcaaaatttctcactccttcaaagtctgtgtatggcaaagatcttcctaaccatcattcaagttagagcaactccatttctgtatcaaaaagaaatacctttagttattgtctgaacttgtcagaatttctgagaacgatgccagaaattctataattgttttgtcacattaattgaacaatgagagggcaccagcattcctcactcatgaggtagaagcaccacatctacatttctttttagctatgggtgatgtttttgcttttaaatcttagaaatctgttaataaacaaataacacaacaaagtttggggtacttccttgtggggactgggatgcttaagctaaaacaaagtttaaatttggactgtgtgtgttatgtttcgcagaatctatatgtttctcaaaagtgggtgtcaccctccttcctcccccaacacacccttcaggggtaagaggagaagtaatgtagaaaaattaactgtttctccactgtaaaagtagggtgtctttagaatgtttcatgttcaaaggaaagattgtgcttctcccaaggcaaggtgttcccttaaaaaaaaaaaaaaaaaaggttgagcatgtctttgtattgctgtctctggaagaggaaatgaggcatctcttggggtgagaacaagggagaattgaactctcgggcctggccagatggattcctcacactggcacagagctgtgaagggaagggcctttcatcctccagaggaaagagggctggggtctcagaggccagagcatagggacaggcaggagtcctgcagccctgatgcctgcccctcccagtacagaatctctgtcctgacccccacctgttgaacctttcaaatcccagtgactcgccagctttctctgtggatattggctgaattggtggcttgtgtggctgcctgggagagcaatttacccctgagccaaggagggggtgggc

SEQ ID NO: 1298 - DNA, 787 bp, Homo sapiens
ctcatccagagatgcactgggcacagggaaagctttttttttcaagtagcagctgctattcattgaaatgttacaattttcctgccttagtatttcacacgtccttatactcctcataacattttttgcttgtgtagttttagccccatttcagaaatgaggaacccaggttcagaaggtttagaagcttgctcaagaccccccagctattaggtgccagagctgcaactggaatgcagctttgactccattgtgggtttctgttccattatcaagagtagcctgacagttggcaataacaatgactgaatgaatgaataaatgaattctccaaagaaaatagttcatgtttccctagtatgagggaatacttgagatagttgttttgagaagggggccacagaccaggagacaccaataagtctttctcatttctggtaaatcgctttataatgaccgttattataaagtgtaaaaacaacaacaacaaaaaataataggcgcagtggttcacacctataatcctagcactttgggaggcagaggcgggcggatcatttgaggtcaggagttcgagaccagcctggccaacatgatgaaaccctgtctctactaaaaacacaaaaattagccgggcggtagtggcacgtgcctgtgtagtcacagctactcgggaggctgaggcaggagaatcacttgaacccgggaggtgaaggttgcagtgagccgagattgtgccactgcactccagcctgggagacagagccagactccatctcaaaaaaaa

SEQ ID NO: 1299 - DNA, 622 bp, Homo sapiens
gtatgcacacaaatacctaacctttccaatgtaggccctagttacttccaaaataatttagaagtgtttacagatatgttttgacgattttgctatgatttttcatttattggtatcagaattgaatatatttagctgttgctctctgctaagtaaactgagacctaggtgtgcttaccattgttttctgtgaaaaccagctgatccgtgttacaaatgactgttttagctatggaaacaagacacctctgtgaatatgattccttgtgtggtgggcatcactagagagcaatgactgtattccctaaagagaaagtgcgagagcggcagtacagaccaaggcagaggtggctgaggagattgttccggtcagcaatgtagaattcctgcccctgtgttctgtgaccccaacagagggagccagcacccactgtgcacctcccacacagcccacactgcacaaggcatttagacagtgccttaaattcactccatcaatactgtgagagccccactggcttcccctttggggttttagacatttagggtattcactgaatactttacgttgaagtgtttttctataacattagaaccaggttcaacttaaaaaaaaaaaaaa

SEQ ID NO: 1300 - DNA, 31169 bp, Homo sapiens
  misc_feature (4244)..(4244): n equals a,t,g, or c
gccgcggcgagagcgcgcccagccccgccgcgatgcccgcgcgcccaggacgcctcctcccgctgctggcccggccggcggccctgactgcgctgctgctgctgctgctgggccatggcggcggcgggcgctggggcgcccgggcccaggaggcggcggcggcggcggcggacgggccccccgcggcagacggcgaggacggacaggacccgcacagcaagcacctgtacacggccgacatgttcacgcacgggatccagagcgccgcgcacttcgtcatgttcttcgcgccctggtaacgccgcgcaggccggcgccctgccccgcacttggcgcttcgcggggcgtggggcgcttgggcgccgcgggcggggggtcccggggccacgtggacgccgacggctctggtctgcggcgtgcgtgctacgggcgcggggctcggggctcaggggtgcggggtgtaatactgggggcgcggggccgggagcgcggggactctgcgggttcggggctccggctggcggggagcggggggcgcgggcgccgcggctcggggccgggagccggggactgcaggggaccgagggcttggggctccgggtcggggggcgtgagctcagcgggccgggcactggcggctgacgtggcgctcggcggccggggcggtgcgggaggagggggcggaccccgaggggacagccgggaaaagcccgccctgcgccgcgctcctgaattcaaccgcctcttgcacctcggcaccgagggaggggaaggtggggtcgtcgccctttcgggcagccgggagtccaaatgtcaccccgcggtccctgcccagcgccccaaacttcctgtgccggccggacgcgcggcctgcccgtgggccacgtgcactcaccagagcggccttgctgctgccgcggccaccggggtcggctgggacagactgcgggcacgtccccttccagaggctttaactgaaaaatagaacccaggaaggtgtggtttcccactttgtgcgtcttttgtgggataggaaggagtggtccgggcagaggagggttgctgagctaccccgggaagaccaaggtagtgcgaattctggaacccctccgcccccctgcagctcagggtggatgtaatctctgaacggagcccactggtcctcaactccaggctgtcctgtcacctccctgctgctctctcgggtccaggtcacttgttatgtgtgagatcggaaaagcccctccgttgagcagatggtccctcttgctttggttctctgggcgaggctttggtgtgggcctcgctgctgacctgagagaccctaccctggcactcatcccacggaagagcttcctgtcattcacacaagcatgtgcacagctttcctgccagtgccgggatgccccgaggaagggaagtgaccacaggccagagcagaaagccataattttaggacacaagacctttgagaggttggaatagcctgcaggttcttgttgcagaacttggtattcttccccagagctcagtagaggctcacttgggaaagggatgtagggaggcatagagaaaaggtaccctaagaaaaatggccagttcagaaattgtacctttcaaactgggagaaacgtttttctcttaaccttgtattcaggctattactgcgtttcagttcatttggagttaaatcaactttttgggccagtgtgggtttattaacaatgtgtatatgaagtacattatgtttcacattcctaagaaccaactgactcgaatttttacaactccaatggtttagaaattactttgtaacataaaacaatcaggcagtattaacagtttctctttgttcgggagtattctcagcaactatttcaattaagtgtactacttaattggagcctatttcagtggaatacatctgtcgatgggttttcttttttctttcttcattatttatttattttagagatgggatcttgctctgttacccagcctgaaaccagtggtacgcagccgcagctcactgtagcctctaactcctgggctcaagtgattctcctgcctcagcctctgaagtagctgtgactacaggcgcaggtcatcacacccagcttattttgttgttgttgtttttgttgtagttggtagaaacagggtctcgctatgttgccggggctggtctcaaactcctggcctcaatcagtacttctgccctggcctcccaaagtactgagattacaggcatgagccatcgcatcccattctttacttttttttttttttaaagaaaaactgacatgcagatgtaataagtccccacagtgccaaaggaattttaagtttagaatctttgcaataaataccagctagtcctgggctgagtgagagaaaactggcacatctgggcacttggtattaagtaaattccttttccattatatgtggcttgtagacatttagctggatgcttccagaataattagctttatgttgttacttttttttttttttttttttttgagatggagtcttgctctgttgccaggctggagtgcagtagcgcgatcttgatttactgcaacctccacctcctgggtttaagcgattctcctgcctcagcctcctgagaagctgggactacaggtgcgtgccaccacgcccagctaatttttgtatttttagtagagatggggtttcaccatgttggccaggattgtctcgatctcttgacctcgtgttctgcccgcctcttcctcccaaagtgctgggattacaggcgtaagccaccgcacctggcatatttgttgacttcttgatagtctactacaaatacttaaacagagatatgtgggtttctatgatggtgtttaagttggacttttaagagggccctttcagaaaactgcagatactgcagtagggctcaggaataggctgccaggaaaggaggctgagtgggcggcgagtcaaatgggaggtcagcaggggcaagatcaagtaggaccaacaatacctggcacaacactttggtaagttgtaaggctgagagcaaggtggtgactctggaggggtctatgcaggagagggaaggaggtcctggagtggtgagctgagcgtttggagctcagatagaagactcagtggactccccctcaacacacacatacctttttccagtttcagctgccgtggagtggtgaaagcccacgtgtgattaaggggctggggcccctgtaacaaaaacatcaatctgtgtatttttgccctgcacttggcttctgcagggttatcctgctgctgtagattttttgccaacatcaggtcacaacttctgtatggccagtttgtgagtcacccttgacctggtgacagtgaggtcaagatttggaccaggtagctttgctctacttcttggccacaggctaccttctgagtgcagctgcctgtctcagagttgggtgctgtagccgcagggccgactagatagcacctgtggccccatcacagccaggagcaagggcacgcccaacttggtgatggcccagaatggtcagttttgatttagcgcaccacaaacttatttattgtttattctcattcttaatctaatcttgtgttttctcaaaaaaaaaaaagggaaaaaaaaagcagtagcaaaacaaaaccttgtcaagattgcagaggagttctaaagttccagaatgagcatatctgatcaaagtcccctgaaggtcagaactgcccttgacagtcccttaggaaggtgccttgttggacaccgccccagtcagtcagtcagtccccactgccagcgtttcctccagcattagaactatcatggcttctttggttaaacaccaaatggactagttctcaaacctgtgcctttagacaacagggtcacacttaatgtagtcggagagatgctcatgccatgagaagcatgtaggaaccaaggcctgctgaggaacaaaaacctcacatctcccagcttgcacacacttcagggttctgtgggaattgcctttttttttttcttgtttccttctcccccgccacataaactcactttgttgaatctacagaagttaaatctgcatgtatagtttcattgtgcttttttttttgtatctgagtatctcataaagcagggattctcttagctggccaagaaagtgctgtttagggaagacacattaacttgaagcagactttttcagtgctacctttaagtctgngtttttttttttttttttttttttttttgaaatggagtcttgctctatcgcccaggctggagtggcaatagcatggtctgggttcactgcaacctccgcctcccgggttcaagcgattttcctgcctcagcctcctgagtagctgaaatacagggcgtgtgccaccatgccccagctaatttttgtatttttagtagagatggggcttcaccttgttggtcaggctggtctcgaactcctgaccttgtgatccgcttgcttcggcttcccaaagtgctgggattataggtgtgagccaccacacccggcttaaatcctttttttcttaagagacaaaatctctgtcacccaggctggagtgcagtggtgtgatcatagctcgctgcagcctcaaacttctggcctcaagtgatccctctgcctcagcctcccaggtagctaggactgcaggtgtgtgccaccacaccaggctaattttttaaaattttttgtagatgggggtctcactgtgttgcccaggccagtcttgaacccctgggctcaagcagctctcctgccttggcctcccaaagtgctgggattacaggcatgagccactgctaccgacttaaatgcttatttttgaggtaatctgtcagaaaataaaaggagatttaacagattattaaattattttgaggaagaagtcacaattctaagcgttgagtgttcatataagcaagtgtgtttaaaaaaaaagcattttaaaaagcgatacagcaaagtggttacattgtaggcatcagtgtgttcctgccatattaaatagcaaacaaacccatgtgtcataatgctatgggattgtagttgaaacctgggataaagtttctagggttgtctcattcaaaattcgagtatggcactgtagacatactgtccagagaacacagcaagagctgtggtcagctgtatgacttaaggtctagtgttgggaaagatgctgatatcctcatgaaatgtgaagcatggcaagaagcctaattaagatactattttaaatgatgggtgattttaaaatatttatacataactgaattcatacaatgaatactaagaatagacatttgcttacttcaaccctagaagtataggtggccacaaactttttttttccccttctcattggagaaaattgcaggtgattaaattttgagattgccttatgtttgtagccatttggttatatagtggaggagacttgacgaataaaagtagcagatacagcaggaagtgctaagctactgtccaagggaggagtagagaggctttccagaagggcaggagaagagaatgggtgctgaacagcccggggagtcagggccaacttgctagaggaagtgacacccaaactaaacctgaagggcagatagatttagctaggtggagtttagggacgaagtgtcagagagaatgtgtcccagggccaagccaagctatagtcctttgggaacactgcagatgctgcagtagggctcaggagtaggccacaagggaaggagggtggactctgggatagaagtcaagcgggaggtcagcagggccagaacaactaggatccagaacaacactttgctaagtttaatactggaacaaggccaagatttcatgctgagaacagggcagtgactctggagggatgggagcaggggagagaggtcctggagtactggtccaggagctgccatctgcaatggtgtaaagaaaggactgagagccccattgtcccctggacagagctgaagttgtgggccagctgccctgtgacctgatactcaatgtgcttgtactcttgccttgttccaggtgtggacactgccagcggctgcagccgacttggaatgacctgggagacaaatacaacagcatggaagatgccaaagtctatgtggctaaagtggactgcacggcccactccgacgtgtgctccgcccagggggtgcgaggataccccacgtaagttggaaggaagggggcacacttcctaggtggctcctggctacaaagaaagtcctagttaaacttttggtaaaggtgtgaagagatactaaatttaagcaggcagtccctgtcattagggagaaactgcatttaatgctgtgtctgttttagatggcttttatacttggataacctttaattcatcagtgttgggttttcctgtttataagagaatgtgtttgcaagagaaaaatgacggtcccgccatgctagatgttcaccggtacattttacacagtgtgcatggactgtcatcagttttggcttgcttttgctggtgacttattcgcaaacacccttcctatagttccttcccgtgtgactcccacagggctgttcctgttggaaagaaagtatagagtctgacagacgatgatacttacttccttgacagttaagaatttttttggttataagaaatagaaattgaaatgttctcaattctagaaatagaattgttctcttattaaacagaaagaaaggactatttaaaaggctgtggaggaacctctgagagccagctccaggggcctggggtctgtttctcctgcacctcccttgagatgacggctttccaggcctgtatctctgtttgcacagaagggcccaccactgactggccctgcttggctggaatgttcgttccaggaatagtcactgtggccagggaaacaggagcttatagcaagacacatgcccattcacaccatgtgccaagtgttggagggaaaagcagttcttcaaaaaagagaagaagctgtttctgaaggaggtggagggattgccacggtcacttccttgctgtttgtttcaattgaggaatgaagtcaattctatacaatttattgcttaattgaataatataggggtccatcaataaagcaaaaaattggagcttatattcaaacctgggaggcagaaaagtggagggatctccaggcttgaacctagaagtcgtagtcaaatcccagctctaccatttacttaccacccagctctgacctcatcacttaacctgtaagtaaggtgatcccccaaacattgttacaggacttacatggaatgtgtgcagacaccaatctgagcacacccaatacatgttagggttttccctaccatttggaaatgtgggtgtttccacaaaggaccctggaattcttggtctttggtgactgcttgctaatgtaagtgccataatttgggtttactttaaatcagatcaatggagataaaattgcttatctgtatctacgtaaaagcattaactattctatgctttatagtattgcattgaaagtatggatcaagagcatcccaaagaagcaggtagtgagcagagatgagggcgaggaggtgaatgcttacctgttgagagactgttgctttcaaagttcaggggcagcaggggtgagctggctgtggtgtctttcctcttaacctgctgaccatctgtggcctgagactatgtgcatcacacaccatgccacagggaaggtgacacaggacctgtaatggagctgagagtggtatgtgttatggggcttcagagaaggaagtgaaggcttccacctcagcctggccataacagctgtcagctgcaatatcagctactccatagttggtattcaccaaaaaccatcacagatttaaaaagtcacaaatgtaaaaagtcacaaatttaaaaaggcccatgttggatcatgtgtttagatttttaatgagaagagctggtctccccaagtaaaccatggctggttttgtgttattaaaaagaacaaaaatgaacgtacaccacactgaacacagtttgggaaggaacctctgtgaccatcactgccctgcagaagctccaagaacagattattttccccccgagaatgcaggaggtggaatgtgctgtgtgcaatgtggtcgcactggggcatctgtagattgacttgagcgagctttgactcctctaagacaagtgcccatcccatagagtggttgtgaggcccgaggcaggtgacgactgtacctgcctgagtccaggcatgtgtcaggacatgagctttcacgttattctttcctggcaagtgtaactggagtaaaggattggaggggcagggagtttgggctcccacgctccctagagatggctggctgtgctcaggaaaatgttttgaggtcttcctgttgggccagtcatgaatcattacagcagggcaggactgacggggggaactacctgtgttagtttcctaggctgctgtaacaaagttccacaaaccgggtggccagaaacaatagaaatgtattctctgcagtcctggaggccagaggtcctaaatcaaggagccagcagggtcatgctccctctgaaacctgtaggggaatcctcccttgcctcgtcctggctcctgttggtttcctggtcatctttggcgttccttggcttgtagatgcatcactgccgtcctctgtcctcacatgcccttctctctctgtgtgtgtgtgtctctctgtgtccaaacccttcttacaaggacaccagtcatgctagattggggcccatcctagtgacctcattttaacttgaatatatctgtaaagaccttattctaaataaggtcaccttctgagattgatggttatgacttacacagatctgtcttgcaggacacagttcaactgataacactgtctacggtagtagaactttcatcatgctgtttgccaaggcagtacctacatggggattttctccctgcagtctccttgaaaaaggagactcaaatgcccatgtggaggcttggtaatagcggaaatctggggcaatactttgtttgggcttgtaccctgtggcccagtctccatcacctccctcacccctgtcgacagtgagaattgaagtcagatgtcccaaactcactgcaaggtctggaccagaagtgtccgctctgtccctgggctctgtgaacttaccgaggaagaatctcagacttcctgggcaggttagaacgattatcagtccaacaacaagaagatggttttttttaaattatttgttttgcaaatgaatagcaaattacaaaaaaatcataggctaggtcttactgtattttacttttagcaaagacacaagtgtgaccgtccctggtcctttctgatgtcttgaggatccacccatttcccttcctgaagagcgttagcgggaggcagagccgtgcaggaagcagtttctgtttccaggtgcggaacacaccttgtgggagcctggggaggtgccaggctaggtgagggcaatcatctttgataccgcagatgttgcagttgcttatcatgttgaacttcgtgacgtagccggtgtactggccaaatctagttaagttttggctgttttttgtggttatgagagtctgagctgctgaggaagctgggtgtatattctgcactggagacacattagggaccctacctatgccccatcataccatcttaggttctgggtaaggccagtatgctgatactaatttcaaagcctaatctagccatgtgacttcattttaaggagaattagccatttttttttggactgaatgtgtgtgtaccccagcattcataggggaaatcctaatccccaatgctggcaataggaggtggggcctttgagagggagcaggttattagggtggagctctcatgaatagggttgcataccttatgaaagaggccccagagagttctgtttccccttttgccatgtgagggcacagcaagaagacaccatctgtgaaccagaaagccctcaccagacactgactctgctggcaccttgatctcagacttcccagtctctagagctaggcgaaatagattctgttgtttctaagacacccaatctgtggtcttctgttacagccgttgaactaagacactattcaaaccttcatgtcagattttacatatgttgccgtcttacaattctgataccgtacattgggcatttactcacaaaatccacatacgcgctgtagaagtggcaggggtgtttagatgagcaggcttgccaacaaatggtactctgtatttcttttttcttctattggtagtcacatttttgcctatccttgacaccttctatgaatttttatctagagtattagagcacgttttcccgtgactgctggagggatacaggaactgagtgttaatttcatcctctggtgatgtcttttgcttatggttaaaggacctactcccgtatcctctctgcagattccttcagaggccagcatttgtaggaaaaagaaaagattccttctctatgggaaggtgaatggacagcatcagtcaatgtcaaggatgttcttatagctggaaacttgaattctcacagtaactggatattcaggccttgtaagagttgaatacctgccaggtggcctggaagaataccttaattgcaaaacaacaccgtgtctgctccagtcctaatttgaacacagacacaacaactgctgaagccgggaaagcataacagtagcttgcagggaaggcccgaggctgctgcagaggagcactgagtactgtagcttttgaggcctcagtcacagcagcgggctggaagttttcacctcattttagttttccttgaataaaaccagaaacttctgaaagtttaggattaactgaatgtattatctcctggaacgttatgtttgtttcctttttatcagagaggagcagatacgtgcctggctgcagccccttgacagctcattttctgattgtttcactaaatgagtttgctctctgataagacaactttctttttgctctgtctaatcctttgttattctttcagcttaaagcttttcaagccaggccaagaagctgtgaagtaccagggtcctcgggacttccagacactggaaaactggatgctgcagacactgaacgaggagccagtggtgagtgtctacctccttccctccctccctccctccctccctctctccctgcctacatctttggggtaatatgtaacggggcagaggccagttgaggttaatgattaaggctgccattttaaagcaactctactttttttggagcttattgatattataggtaaagatgaacttttacagaaactttttggtgtggaaatacctaaatgtgcacaaaagtcaagagaaggctaaaccctcagtttcagcagttaccaccattttggtgtttgtcttccccgccaccctgcgccttgtttggctgtagtcagtcttcagggaagtcacttgtgtggcctcacagataagcacttactctttgttaacactgccaccctgccactgtcacaggtaatacagttcacaactgtaccctagcatcagagactgactctggaccacctggggtcagggctgggcccagcctagaatctcctatccaagccagcactggagcctcctcccatccccccgacctttgccctccaccacctgcagccctctggctcgggcctagcccgacagctgtacccgtagggtggatccttccttttcttctcggtgctcagtccccgagtctctaatgggctttgcttataacatcattttgtaccattaatactctgtgtcttaatgcacttcccttactaaggctaatatcaggagattgtagactcttagaatattatgtactaaaaaggatttataatcctccccctccccagttgatgttggaagtcttcacttttttataaatcatgatcataaaccactggttaagtgttcctttgtgggtggtgccttctgattaatgccgagtgctcaggtccctggatgccgggtagacctggtgggtcatgctgctgtgttggagagggactggaaaaacacccgtgttcctacactgtaggatcctgatgagctaggaagagcatctgaagtctttgtaatttcaatttcaacaaatacctaagactaccttcttgtatcagctaagcgcccactgatttgaaggtggtctgtggtggtccttttggagctttgccgcttactgttgccagtttccagtgtgtctgtgcggctcttccgctctgccccatcttctctgatgacctaatcagaaacttggctgctgattcagtgcttccatccctcacctgcaaagactctctcaactcggctgggtgtggtggctcatgcctgtaatcctagcactttgggaggctgaggcgggtggttcacccaaggtcaagagttcaagaccagcctggccaacatggtgaaacgtcgtctctgctaaaaatacaaaaattagccaggtggtaggtgcctgtaatcccagctacttgggaggctgaggcaggagaatcacttgaacccaggaggcagaggttgcagtgaggcgagatcatgccactgcactccagcctatgcaacagagcaaaaactatcgtggaaaaaaaaaaaaaactctctgaactgtatggtggagactgttggtgtgtgatgttatgtcgttgaaccagagacttacctaactttagctaaaagaaccacagacctctcaggaaatttgcatctttgtcctggcaagaaagctgaatgagcaggtgtgactttcatagttttcaattggacattgtttcctttgtgaaaatattctctttgtggggacacatatattggatggtagcaaaccaattttaaggaggagttaatagcctcaaataaatttcaccaaaaaagccagtcttctatgatggctttattcaagaaaccagcagccagtatcaggacggcagaaagacctcatctcatggcccatttcccttagtggaggtggcggcctcacctgcaggttggaaagggctgagaggctgcgtccaggctctgcaagggactttctgtctcctcagtgtgggagcaggatggccgcgtgtaatccccccatgccaccccagaaccacagtcaccaacttgccatattttagtgtctccagcaatagcaggccccagataattgccagaaacaatgacaatgcgccttattgtggaaaagtttaagtatatacactttatactgcaaaccagaattctcttagctttttaagtgaaaactttaaaaaaagttctttatctgtatacctaagtaacttagtacatacattttttaatattcacgtgggataaatttagatttttttaagtgttgtggcaatattcaagaaactcaaaagacaatttgtcactttgtacattctactgcaatttttgtatttccatgtttgcttctgtattttttcttgaacagttatacaaacatgtttcatctcattaatgattttatatatttatgtggtctttatattgatcatgtcttatattattttatcatgtggatttgccataattcaactctaattctgtcagtggatatttaggttatttataccttttccatcatcagtaatgatgtagggaacaagtttatctttgtaaaggactttccacccccccttcttttgagtgatatttttagaatatagtattcccagacataaaattataaggccaagaataaaaaaaaagatcatttttatggctcttgatgaatatagccaggtttcttaagcaccatatcagcttatgctgccactgtagggcaagacgtgacctgtttctgggatgcactgtggtgttcccgtgccgggggactgctctggagtctgccaggaacccaggaagcaactagaggccccgcatgtgccataaatgaacacttcatactgaaaggcccttgaacatctcatggagagtggcacacggtattttatttcaccttatgtgcacccattgactgttcacttagccattcttcccttgggcattgttttgtgtgggtatttagcactttgaaagtcttgacgcgctggcagcagaagggaaactttgtggttctttatgattccagccctgcacagctttgaactgtcagcacctttaaagcctttaacaacttagcttggatattctttttaataggaatatgaacccccagataaaagctgagtaatatacacttaatgtgtctgcagcagaacactgattccattatctttccctcatttctggttactttggttggaagccacagctgtacctggtctgaaaagttgagaaatgtaggattgtgactagacagctgcacacattgctgtctgcttgggtcctggcagaagcatcttttgaaaagcccctttccccctctttctgtacgagacttagtcatatgaattacattctttcttgaaggtgcagcttatgttcatgccatggttttctctctgttgcctttcattcacctgcattttccttctcatcacctccttttctctctgatcagtcttccacagttgtgtcttcctcacagttttccctgtcatttgtgtaaagtaaggataaccaggccttcctggtccctgagtttctcattctcagctttgtccattttgctaccctcgtgtctgtttgtgtgttttttgaggaagagtctcactctgttgcccaggcaggagtgcagtggcatgttctcagctcactgcagcctccaccccctgggatcaagtgatcctcccacctcagcctcccaagtagctgggaccacaggcgcacgtcaccatgctcaggtaaataaaattttttttttgtagcgatggggtctcactctgttgcctaggctggtcttgaactgctgggctcaagcagtcctcttgcctcagcctcccaaaatgctaggctgtcacctaggctggtcttgaactgctgggctcaagcagtcctcttgcctcagcctcccaaaatgctagggttacaggcacgagccactgcgctgggcactctggtgtctgcaagtgctgaccccttcagaatacgtccattgggcgttgtattttgtattctttgtgaagtatccaagtacgtttcaaagaagaggacagggtatagggtaagactgtcctttgcattgtctgctttgtttggttgggttttggggtagggacagctatcacttggctgccctggagactcagacctagagctttcactgagggtgaggctgacgagggggctttttgctgaagcttccagagggcttgacgagatcagttcctgacctggcctcactcagcacagcagcatcgtacaagggttcccaggttgttgggtgagggaggcatctgcaggcggttccccacagacacagtcacctcctggatggtttccctgtgtctccactgacacacccatgactgttttatttcctcctgttagacaccagagccggaagtggaaccgcccagtgcccccgagctcaagcaagggctgtatgagctctcagcaagcaactttgagctgcacgttgcacaaggtaagggggacgtcctgatgccagcttcagagaatcactattattccttggcgtgctgggcttttccttcctgctactcaagggctcttagatagcagcatcagtggcactgacaaagggtcactctagaggagctgttgggaccgttgttcagtgcacctcctctaaaacatgagttctccttttgtctgtgcccttatagaaacgccgagtctaatgctaagcacacgtgacccgcacactagctggacagtgcatccttggctaagagtgtttattgacagactcacctcgcttgattgctctttactttattgcactttggagatactgcatttttttacggattgaggattttggcagcccagcatctggcaggtctagcggtttttccagcagcttgtgcttactttgtatccctctgtcagcatctttttagcaataaaatattttttaattaaggtacattgtttttaaagaagtaatgctgtagcacatttcatagactatagtgtaaacataactttgatattcactagggaacaaaaaaatttgtgtgacttgttttattgtgatattatctttattgcagtggtctggaaccaaacccacagtatctcggaagtatgcctgtgtattaatgataatcatatgcttaatgacctcaggcagaaacaaaagcttctctctgtctaaacagaatttagattgggcacagtggctcatgcctatcatcccagcacttggggagaacaaggtgggatgactacttgagcccaggagttcgagatcagcctaagcaagaccttgtctctacagaagattaaaaaaaaaaaaaaggctgggtatggtaagcgcactcctgaagctgaggtgggaagatcacttgagcctggaaggtcaaggctgcagtgagctgtgatcatgccactgtactccagcctgggtgacagagtgagatcctgtctcagaaaacaaccaaacaaaacccagaatttaatgacaccgttataacatgaatcaaattagttactctttacacttaaaagatctttctataccacatcccattttttgcaaatggtctcctaatatcagaatgatccccataaaatttccagtgtgaatacataagtctccctttattcacacatagatgtgtttcagaaaacttggcccaacaccgaatgacttgaaagcaattttggcttcctggccggctcccattaccaaatgctaccatggagagaaatccccttagaagactgggttggaaacgtgagaaatggcttggattgcctctggccttgtgacttgtgcctgctgggagtcagagcccctcccccaccacacttactgtccacagtaacttatcgtgaggccttcagccttttcccacttttgctaaaagttatttcatccataccagcgccctgacggcagaactctagcatgctttccgctacgggaatgcattttcagctgggattgtcttgggctctgagcagggtgtgtttcccaaatcacctgttacggaccgactccggcaggacagaccgactccggcaggcctagccagcgcctccctaagtgggtcactgccacacagctgtgtcgtgtaggtaccatggtggcttcctgcccttgctggcttcccatcagtactctgattaggttcccagagagcctgtctccaccttacagtgcaggatctactgtgcacctgcacatggtttcagctttgcacattttttaatggaagttgttaacttttaaaggaagtttttcaccattttcttcaagtgcattgttgctgtgctgatgagacagtagctgtgagccttagtgtggcagagtcctgctcagacgccaggccacatgccactggttagttctctccccggccacagcctgctttcagtttggtatcagcccaatgtcagggtagaacagctaaacaccttctgtgtccaaataatgatgctgtgagggtttgtttgtttttttccccgtagccaagggggtgatgtttcattttttaaactttttttcatgataaaatataatacagatcgagaaaacaaatgtagggcttaatgaatttttatagcgtggtcacactgtaactactgtccagttcaagaaataaaactgccagcttcccgtgtcccatgcagggcacagcccgccctcccttctccaagaaggcacttgcctgacatttgtggaaaccacttgtattagtccgttttcactgctgatgaatacacacccgagactgggcaatttacaaaggaaagaggtttaatggagaactcacagtttccacgtggctggcgaagccttcccaatcatggggaaggcaaggaggagcaagtcacatcttatatggatatcagcaggcaaaaagagtttgtgtagggaaactcccgtttttaaacccatcagatctcatgagacttattcactatcaccagcccagcatgggaaagacctgtccccgtgatccagttgcctcttacctggtcctccccacgacatgtggggaattcaagatgagatttgggtggggacacagccaaaccatatcaactcctttatgtgcactgaagtgcacattcctgagcactatagttctatatgtgtatgtgtttatatatcttttaaggctcttttaacctgcatgttctccagacatctctttatctttcttgctgaagacataggtggtttgacctgtagagctccccgtggtccagactttgctaattgtgtccccgtagtgtggtctacatgtttccctgatttctctgtttcctggaaattggtagttgggtctggggacaaaatcagtttcagtgtgatgttttttgggggcacaagaagacctcatagctggtgggggcacagaacgtccagttgtctctctttgggatgtggtcgaccatgacaggcagagcctgggtccgtccattccttagggctgccaagtgccgaggctcattcaagcgtcccttcattttttaaccaagagaaactcaccctcatttatcacctggttattcagcggtacagtgcatataggagaggtgggagaaatgcctgattctttccttttattacagttttccaaataatgagttgattgctgattgtccatcaaagatgacaaatttggttttgagtattgttatgaactcatgaacagaaacacatttgatggagtccctttgtaccaattaaagtgctcatgccgaactaagatttgctaagcaggacaaagatctgattcttcaattaactctctagtgaggtctgacataaattacagttcctctttcccccgtctctgccttggctctccactccaggcgaccactttatcaagttcttcgctccgtggtgtggtcactgcaaagccctggctccaacctgggagcagctggctctgggccttgaacattccgaaactgtcaagattggcaaggtgagtgaaagcccttattaaactggaaatggactgctttgggctggattaattagcagagtggcccattattcattccgtgtgcaaagtcgcaaacttgatttattaattccatttagtgtgccacttgataattcatttcaccttcacagatggcagtctgattttgagttttgctggattttccacagcctagagataaattatggcctcggctgctttgtttattttgaagagatggccaaatctgaattggcagccccagagcccgttctgcaaagagatggggtagagccttgtagaatgttcactggacgaacttggagaccgtccacgttcgacctcacccaagagctctctctaaaaggaccctggctctgtgctcccccaagcacgcagaagaccctccctcagtttgcactgtgcctgggattctttccagcatttcctactttatacagagaagccaagagtggtgtctgacaacttctgtgtaactggattttctggaaatatccagtgtagctccagggacatcacttttattcttctacactttccagcacccaccagacaccatgcatagatttcctttcttaaaaatctcatttttctaccttgccatggggctgatttgtatccaaaagtaatgctgcgtgtctaggactgaatgatggttaacaggatgatctaattgggatggtgagatggtcaaaagcataaacttgggggttgggtagacctggctggctgaccttgggaaaaacctctccacgcctcggtctccccctttgcaaaactgagctaagatctactgtgtggtgtctgggcagatgaaagtacactgcttagtgtgatgcttagcatggggcagatgcttggtaaattgtaatcacttttgttgtcagttaaatggatatttcactgttgcctcttaaacgcttacgataatatatactaattatacatgttattatcagtttatatttattgaacatttcggggaagtaattataaaataatcttgtctactgtcttaccccattccttgtatccttacttaattattgtatgaaaatttatgggagattcttttaggtttatatccatagaggatcctagcagacctaggcgtgagcagacacaagcccaggtgaccacgctgaagcccttcatccctggcacatgtggctgggttacactggacccttaaaaatgcttgtcctctcccgaccttgggctgaggcctcttgtacttcagttccgcaccttagctgctctctgacgggtcttaggtgttgaaatagtatttttacccccgtttgctgacatagtgaataacaacttagtcctgcctattttagtgctggtagaaaataaaaaagaaagcaatgacttagaacaagatgtttcatgaaaatgttgggcaagcagcagctttatgagatttaaatgaaagaaaaagcttgaagagctgtgcttgttggtaaattaagtttataaaattaaggacggattataatcttgacatctttgcagtcttacctttattatataccaactactcctgtttaaaattcatttcttgctccctgttgattttaaaaccctctaagcttcagcatgagagtaaattctaagctggcatgtgaactggtctgggtcccagtcaccgacagccaggctaacccccctcccaccaccaccaaatgtcaagccagggccctgactccagctaccaggtgctgactttacttgctcgagttaaaatgttgcttcctaaaaaccggcatgtttaactgagctattaatacaataaatcttgcctctaaagtctttcctttactccttttagctcaggtatgttttagcatagctttcaggaacattctcttcaaaaactgcaccttgctggcagagttgctacagaatgtggattttgaaaagaatatttgtaacgtacaaagtgtccagtagccccattagcaagaaggttcatgaagaaactgactgggaagttgatctgcttttattctcaggttgattgtacacagcactatgaactctgctccggaaaccaggttcgtggctatcccactcttctctggttccgagatgggaaaaaggtacgtctgcacttcttagtactgagaattcttcatctcttaaccccatcaggctgagctactgagtggtttaatgggcacagtgaattgccaatcttgattgttagggcactggtttggagaaatgtgtataatgaaacaaacgtctttctcttaattgataagatttgggttgtggagatgaaccttgaaacatttcagtggcccaggttatcactagaataacccacatcttacagtcacagggtaactgtgctctggtcgtaaacacaaaccttcaggcctttgaacagagctaaggcttgcacttggtccggttctgcctgcctccctccctccttccctggccgatggtcagcagctcagagttccccatcagcacaacggcttgctggcaggcctctgccccagacttctatgatgtgtaaccccgtggagggaagaggggcctgtacagttctctcaccaaagccgaggcattcagttatcctctctacattcccgtctaaatatgaacatgcagactttgcaccaccgctaagacatctgggagctctgacccgggcaagcaggggttgcaggaaggcttaagtgattcagaacacctcagtggactcactcagccgcgtgcccgtgtctcggccaggtggatcagtacaagggaaagcgggatttggagtcactgagggagtacgtggagtcgcagctgcagcgcacagagactggagcgacggagaccgtcacgccctcagaggccccggtgctggcagctgagcccgaggctgacaaggtgggtgcctgctggagtcgggatccccataagtggcccgtggcccccggccccccacctccccaccctcagaggcctcctcaaatgctttggacaaaatgacagtttggggacacagtcatctgatggttggctccagttgcgttttcaacacgtatttttcatcgactttcacatgctttcaggggcgaatgcaaacaaaagctttccttttgaaaacatgaaatggatgtgagacaaatcccaagacaatatttggtgtcaaaaatctctagagaatccttcctttccgcttcattcattttaaagaatgactctgctgggcatgtttctgctatgaaatctcgactgctggccccggggccctgattctattcctgaccttgctccgggcattttcctttacccgttgtaaaggcccctagaagacctgtagccaagagggcatccgcagcgatcaggccagtgactgtagctgtaacctgcctaggcagtcctgatgcactgaggggcttccttccttcactcaggtagcaggaggtttcagattcatttgttctgctttatgaagcccttgttatgtcacaggcactgttctaggccaccaggaaataaaaataagaccggtttcctgcctctgaagcatacaggtctctgaggcaaatggtgagaagacacacaagccaatggcagggggctggggcagaaatgtgtgcagggcttggctgctagagagaagtgggggcaaatgggcaagaagtgtccctaaagagctgattgacgggatctgtgctggacagataggctgggcagggctgccactgaggggctgcaccaggagaggcacaacccgagaatcagccggcatttctgcagggccagagctggggctgggggaacacagtgggagacaggtcagggtgtggtgtaggatccctgagagtgagagaggagctggagttgagagtctgtgggcagctggccaaggattatgaactgtatcccatattgacagggagcccacggaggctctgtgcagattggagttgtaggaaaatgaccggcatgcacgtgtgctggaggtgggaagctgctctattaggcctttaaagatgatgagttccctcatgctgcagccgtgactgtgcgatggcgaggaggagaaagccagcataaggagtccagccgctgtgcagcgcggaggagagggagggagggtccgaggcgagtctgattcccgcatatctggtggaggatggtacccagcacaggggcggggccagagctcgaggaaagggatgagcttggttttcaaggtgttgatcttcaaggctttcggctgtgtaggtggcagtgtccagtggcagttccaaccatgagcctggggctgcggcaggaggtctgcactggacgagagtgcccgtgtcatcctcttcaggtagaagtcatgcctgaaggccaggagtttggatttggaaaaaccagtggggccaccaacccctcctccctggtggggccacaccaggcctcctcacccctacaaccctgtccctagttgggctcttgtaggtcggggatggcctgagtgttgtttaaaagttgacgttttggttgaagaagtaaacagctgattttgtagttgtcaggaccacttatgttagaggagtgtatgtgtcatggtggttacaaaggtcatcccaaattgagtataattatacaccacggatgttttcatcgcagcaccatttctatttataatgcagttttccaccatgaagtgggtcttttcagtgcgtgtggcgtcatgtttctggacataaagatggtagtgttccacagtggcccccttggcctccgtcactgacatgttactcgatgccagactcaaatggagcagccctggtacacttagccacgtgataaatcatcccattcctgctctcaggagagaatcgcagatccatttttggagaaacacatagacgtcattctgtaaagaactgtcaagggagaatggctttaaagcagactaccatgtagcacctttcccttaaattctccagccagagcttccatcagcgtttttcacattgacttagaacaggctgctttccatttttatgttcaatgtaaaacaggtatcattgcctttgctattgtaactaggttctttctgttgcatagagaggatgtcacaaagggtgctaggagaatagggtggccagtgagaaaagcggctgaggatgagacttcagtgggtatcctggagactccaggcttagaggtgcagactcaagtgtcggacacccagggctgcctggtccacaccacagcgccctggagagttttcaacctgcctcatccccaaaagacagtccccctccccaccttcatcccctgtacagtatccagccacctcctcaccacatctcccaggcttgggacccagggacttgcattgatctctctgcccttcagaggctgccagcctccctttgtgtgtagcctatgaaatgcagattgtgtaggtatttctgtgtgaccttggagcctacgtaactgcatttttaaaaaattactgattcgtgtatctgcaatcccaaagcatggccctgctcaactttaagggatgtacttgaactgtggctttttcctcccttgaagggcactgtgttggcactcactgaaaataacttcgatgacaccattgcagaaggaataaccttcatcaagttttatgctccatggtaagtggctgtttaattagaaactactttgtccatgtgtactaagtcacatcatgtttttcagctcatctgccacccctccagactcaatgttgggcacatgttacatttatatgtaggtcatgttgtaggaaataaggaaccgttatcatgctcctatattcaaatattttaaacttcaatggccttaattatatatggagaatgaggctacagttatatcaactttgattatatatggagaatgaggctaaagttatatcaactttggagaaaacataaaaatggaggcaaattatgatggccatattcagttttgtggtatctgcacttttccaaatagatggcttttctttttggctaaacaatgagtgtcatgatgtagctttgctcctcggttcttttaagtactcggatttcttttgtagagaaatccagtagagtctgttagagccattcagtatgctacgcagtttcctgaacctgcatgccacgtggtcttggagaccagagcagaaatggattgcaggtagtgtgagatccagacaaccttggttctaagacttaccgtgaatgactgtatagtaaacttggatgtcctttaattcctttgaaccccagttccctcagctgaaaaatgggagtaactttttgtcttcacaaataaaacaatccatttggaaaagcagagtgttaggacaacagtagattgtttatctaaacatgataaaggcgtcacttttcttgtttgttacactccacatgttcctgagaaactaaccataggggtaaaaagttaataagcacaggacttgaacgaaccatagcaatgcctttcaaatcatttgcaacatttaaaaacctaaagctccacagatcaagtatcaaaaaagaggatcccctttggctgaaggggagccatccatacggcaggagggggtcagaagagacaagggaacagagtcgggtagaagggagggtttgaaccaaacttaatcatggccttgattctcaccccacatcgctgaagtaccaaggaggccttaaaatggttttgaaattgtgagaccataagcaatcaaatctaaaatgtctttggcattcaagtgaccttttagaaattgtgtggcatctgccctgttccctgttcctctgctcctgtgctttcataaaccagttagcacagttcaccatggcatggaaatggtctcagaatctcaacttgttttgagactggcttgcttctgtcacattatctgaaagtctaccttggatcaacttttgggttcttcatttgggataggaggaggaagagttaatgtgcacccagtgggagaatttggtattttacaaatttctaggcaattgttgactgtcccatacagaagaaacagagcttgtcttggcagcagagtgtaggtgaatgatctcgacccaggatttcaacgaagctgccatttttctcgtcttaggtgtggtcattgtaagactctggctcctacttgggaggaactctctaaaaaggaattccctggtctggcgggggtcaagatcgccgaagtagactgcactgctgaacggaatatctgcagcaagtattcggtgggtacttggatggatgcttatgggagctctcagtatgggggcagatcccaagggaactgtgcctcaaccacgataactcactctgctctcatcttctcaacaatgtggtttttatgtccctttgagttgtttgtttggagaagcaaaagagatcctctctcaaagggaaggcattcttcttcgcccgctttgtagttagtatccatgtttcagtgcaggttttcaggccttgctgtctgagtaacaaggccgtgaagtaacagaccccacgccatagactgtggggcttcccacaccgcgactcttgatgattgaccagtggtctgtagcctttgccataaatacccgagtcgctcatttttcacacataagccagcattataaaatgcagtggctgaatctaagaatcatttcaacataacctcctttctgaaagggccatgccagcaagtcggtcctgtgcttgggttaactactgccttcattccaagctgttagcacagtctgatggcctggaagatttgtcattttttttcttctttgttattcagacacttttggagccctttagatggagaatagacgtaacccagacatagtttccttatcattaaaagataccagttgttttttgtgccctaaaattcttagaaacgagttgccactgaaacatgtatcctcaagaggatcttgctctcatggtctggtctgcagaccaccagggcatcgccagggaggtcattggaaatgcagactcccaggcctgctcaatccaaatctgcaccttcagcagatccgcaggtgatcgtgtgcacagtaaagactgaaagcgtctgctttagggtaaagtcgttcctttgaggctgatctttaatgatgtcattttgaattcacaagtgaacacacagccccacggctgtgctttctaaacagtagtctgctcctgttttaatggaatatacacctttaaaaattagccacagaatttttccagccacaacggtaggagtgtatctggttttatttaggaagcaatttgcatgtgatctggaccgctggtttgcaaacttttttcttttttgttttaaggtacgaggctaccccacgttattgcttttccgaggagggaagaaagtcagtgagcacagtggaggcagagaccttgactcgttacaccgctttgtcctgagccaagcgaaagacgaactttaggaacacagttggaggtcacctctcctgcccagctcccgcaccctgcgtttaggagttcagtcccacagaggccactgggttcccagtggtggctgttcagaaagcagaacatactaagcgtgaggtatcttctttgtgtgtgtgttttccaagccaacacactctacagattctttattaagttaagtttctctaagtaaatgtgtaactcatggtcactgtgtaaacattttcagtggcgatatatcccctttgaccttctcttgatgaaatttacatggtttcctttgagactaaaatagcgttgagggaaatgaaattgctggactatttgtggctcctgagttgagtgattttggtgaaagaaagcacatccaaagcatagtttacctgcccacgagttctggaaaggtggccttgtggcagtattgacgttcctctgatcttaaggtcacagttgactcaatactgtgttggtccgtagcatggagcagattgaaatgcaaaaacccacacctctggaagataccttcacggccgctgctggagcttctgttgctgtgaatacttctctcagtgtgagaggttagccgtgatgaaagcagcgttacttctgaccgtgcctgagtaagagaatgctgatgccataactttatgtgtcgatacttgtcaaatcagttactgttcaggggatccttctgtttctcacggggtgaaacatgtctttagttcctcatgttaacacgaagccagagcccacatgaactgttggatgtcttccttagaaagggtaggcatggaaaattccacgaggctcattctcagtatctcattaactcattgaaagattccagttgtatttgtcacctggggtgacaagaccagacaggctttcccaggcctgggtatccagggaggctctgcagccctgctgaagggccctaactagagttctagagtttctgattctgtttctcagtagtccttttagaggcttgctatacttggtctgcttcaaggaggtcgaccttctaatgtatgaagaatgggatgcatttgatctcaagaccaaagacagatgtcagtgggctgctctggccctggtgtgcacggctgtggcagctgttgatgccagtgtcctctaactcatgctgtccttgtgattaaacacctctatctcccttgggaataagcacatacaggcttaagctctaagatagataggtgtttgtccttttaccatcgagctacttcccataataaccactttgcatccaacactcttcacccacctcccatacgcaaggggatgtggatacttggcccaaagtaactggtggtaggaatcttagaaacaagaccacttatactgtctgtctgaggcagaagataacagcagcatctcgaccagcctctgccttaaaggaaatctttattaatcacgtatggttcacagataattctttttttaaaaaaacccaacctcctagagaagcacaactgtcaagagtcttgtacacacaacttcagctttgcatcacgagtcttgtattccaagaaaatcaaagtggtacaatttgtttgtttacactatgatactttctaaataaactctttttttttaaaagtctggtctttccttcaatgttacagcaaaacagatataaaatagacaataaattatagtttatatttacaaaaaaagctgtaagtgcaaacagttgtagattataaatgtattatttaatcagtttagtatgaaattgccttcccagtacatgattgtgaaaaagacatttagaaaatattctaaaatttaatctgagcctcactttctacaagggaaatcatgatttccgttcataaacagcatgctcatccccctaacaccattcttataagctgggcaccctcattttattttcttcgttggttctaaccctgtggcgtggtatgctgtatagtaaaaaggcagagaaccactttactgaaaaggtactagagccggcagtccagaagttaatgtgctggtcaaagaaccgttctggtaaagaagaggtgagcactgccttcacgtgttacacggttacacaccccttgtagcctcacctcagtgtaatcagtctacttttggtactagcaaagagtacagcaaatggaggattgaggtgtagaaatggtatgttttggctgaaataagtgtattttcacaccaacaaaactccagcacgaacatacaacagcaatgactgagacaagggcgccccgtggagccctggctgtggcctgggctgtgcgtcctgtggacttctgggaatgaactgaacagaggcgttccccccacttccccgatttctgttctctgtaaaatctacctttgatagacagtactgaaccagctgatcctttagccaagaatacatttaactcctttgagattattttccctatttactaacaaacaccccaaatagcttgatctacagctaaaactaattttggtgggtttttgggggaggagggtaggaagagcttcacggttatgtttctgcagttaccagaccttatgctacagacatccaaactcagcttgctacagaccaacaactactcacgtcatttaccaagtgagcaaattattaatgaggtcctttaaaatcttcctgggtaataaggcactggcatgagatagtttcaaagtctcatcgtcccacctccaactgtgcttccgtgtttttttaaggcagatgtaatctaggaatccaaggcagaatgtgtgtccccagcatctggtttcgagttagtggcatccacaagctcttacaaccatattcctgtattttttcagaatgacattggagttgtcatcaaagtaaagaaccgagatggcatttagcttagttggcgcacagcacggtttggggacatactcggggttcataaggtgaacctgttccaaaacagaaggggagaaggtaccttagaaatgacacctggtcttggcttactcccacttacaaaacaaagtctccgagagctcaccaaggtctgcacaatcgcgtggttggttgcattcatgtgtgcgttgagtgggaaggagcattctccatcacagtaattggcagcatagcccttgggtgcaatgatccagtccttaatttcatgcaaaggaagcaacaaaagatgagcatgcacttctcacactatttgtgcttttcaggaatgctgtgaaaaggtatttttcacattgcacaggcaaggatacagacgcaggaaggcttaggaatttgtccaagttcacattcaagtggcaatgctgggaagtgaacctggtccatctgaccccagagccctcgctccttgcagaggcccacagggcctcagctgctacctggaagcacgtaggttgccagcaatatgtgcttggacccaagcaagcctctccaggagcccacggtgctcctgcggaagtagtgccacctgcatatggaagctaccttt

SEQ ID NO: 1301 - DNA, 1044 bp, Homo sapiens
gaagagtcagccttcttcttttcctggcctaggtagtagagctcatatagaaaaagtgagacaatattggtaccaaactacattatttattgcttccactgaactggtcaagaggcagcaggtgaggcatgaagatgggcagttctcagaagttttcctgaacctacaggtttatgttaatttttttatgtataatttgtcttccttgtttatgatctcattctagtctgccatgtaaccccttctcaaactttaaaaggacctcccttgagctggagctaacgagaccatttcttgtctgcttacaattttaaaaaaaaagctatttgcaagtaatttttctcattatgatgctgttatcataaagtgagattccagtagccagggtgtcaagggatggtatatggacagtgcaactttgacttactttactctacttagtcaaattttaactattttctggttcctttcatttgaatataatagttaaaataatgcagaccattcacagttcatatgttctccctttgtttttctctgactccacatgcactgacatgtatagtttctgctgaatttattaatttggtccagtttattcctgctgttaactttgatttcttttcctcctcttatctaatatttttcactatgatcagtatgttccatgaaatatatatattccttatttttctctcctaaagtataaacaaattgtcattgggaaaggagaacacttttctctgactcacataatgtagtagtaatcattcatattttacttatttgtggctgcataattgtaataggaagagtgtgtggccaggtgagcgaagccagaaaatatgttgcttggtagtttttccacattgctctcaaattttcatatattttgcttatttactggcccgtgtgtgacagtagtcacacaaatagtacctattattgtctaacttggggatgccatggggaaggtgtagattttcttggcactggattctgcaacacttgattaatcttaattctatggcaaaaaaaaaaaaa

SEQ ID NO: 1302 - DNA, 1047 bp, Homo sapiens
gaagagtcagccttcttcttttcccggcctaggtagtagagctcatatagaaaaagtgagacaatattggtacaaaactacattatttattgcttccactgaactgtcaagaggcagcaggtgaggcatgaagatgggcagttctcagaagttttcctgaacctacaggtttatgttaatttttttatgtataatttgtcttccttgtttatgatctcatttctagtctgccatgtaaccccttctcaaactttaaaaggacctcccttgagctggagctaacgagaccatttcttgtctgcttacaattttaaaaaaaaagctatttgcaagtaatttttctcattatgatgctgttatcataaagtgagattccagtagccagggtgtcaagggatggtatatggacagtgcaactttgacttactttactctacttagtcaaattttaactattttctggttcctttcatttgaatataatagttaaaataatgcagaccattcacagttcatatgttctccctttgtttttctctgactccacatgcactgacatgtatagtttctgctgaatttattaatttggtccagtttattcctgctgttaactttgatttcttttcctcctcttatctaatatttttcactatgatcagtatgttccatgaaatatatatattccttatttttctctcctaaagtataaacaaattgtcattgggaaaggagaacacttttctctgactcacataatgtagtagtaatcattcatattttacttatttgtggctgcataattgtaataggaagagtgtgtggccagggtgagtgaagccagaaaatatgttgctttggtagtttttccacattgctctcaaattttcatatattttgcttatttactggcccgtgtgtgacagtagtcacacaaatagtacctattattgtctaacttggggatgccatggggaaggtgtagattttcttggcactggattctgcaacacttgattaatcttaattctatggcaaaaaaaaaaaaaa

SEQ ID NO: 1303 - DNA, 1047 bp, Homo sapiens; identical to SEQ ID NO: 1302

SEQ ID NO: 1304 - DNA, 2743 bp, Homo sapiens
ttgaggcaaattattttgcattcatgttatttggggctaggtattgcttaggttcgtgaatgctgttcttacagacacagatggtacctgagcccctcagacacctgccctttcagggacgttagcatgacttacatctgtcaagtggttccatacttcttgtaaaagtaaagtttgggtattgtttgctgtatcaatatgatggctttccatgcattgtctcattatccctaggatacgtgctaaaggaaaactgtcctgtaattcctgttaatatattgttaatgtcagacgtgatgtgatactgttggactgtccaaatgtacaacaatttaatggtgtttgtagaactgatatgtcttaaatgttgcatgaaatatgttataaaaatagatttgttttctattttcaacacctcagaattgagggttcatgggccaataagtgcaatatttaatgactcactcagtgtatataaactagtatgaaagagtgaattataatgaatgtgtgagatgctttgatagctgtgtgacttattcaaatgattttcttgtagctgtatttgtctagtggtgcaatttatacagtaaatatcttattggtgtcatgtaaaacccctctgtgcctacttcaaaatacttttttcttataaaaccaaacatttagtatctggaaatatgtgtcaattttatctcttagaattgtggattttattgtcaagacagaatggctgttcatttattttataaaagcatctccttctataactcaaaattgtctttaagtgtcatataaaagtgtacattttacttttaagcaactaatttagatacctaagaaaaactatgtgcattaggaaaagtcatgtttttcttctcagaaaggttgatcacatgatatgtctactaagaattttcacctctgtacttgtatgtatattttattgttactcaatcttgtattttatttacaaattcaacactgtcaaccctgggaattctaaaataccaatgtatttttaggttgtagctaatgttgtattcactttcaattctcagttgtccacactggtgatataagaggaacaaatcagaatcattaaatactttgtaatgccatcataaactcatatattcatcctcaaactcccttgtttaatgctaattggtggcctggaacttcactgagatgcaaaatcaagaactgaagcctagttgctagataacaaaaagctataaatgtttatgtatgtgaattttaaattagaataaccgtcttaaactcctacttgccatttctaaggcaaagcattcattttaatattgtactttgccttttcattcagttagtggagtaagtcatgaaacccttaggaagaaaaacaagttatgacttattcactaaaattgatgcaagacagttggttctagatgaccatggccatgtgttcatcatataaaaccttcagttctctctatggtgcttggctggagattgacatgtgaggatgtgccaatcatattaaatggatttggtctatgtgggtgatatgtggcctgaatgtaactgtgatagactgaaatttgttcttagctctcaaaatccactgaagaagtcaagtgaaggtgggtaaaatagggagattagtgacaactttgtgccaaattttttaaaaaatggaagcaggtagccaatattagaatgataatttaagggtgtggttgaattttagttagttgtcacatagttattgaacctcatatgctcagtgctgtgggaatcaaacatggaagaggtatggctcctgcccctaatgagaacaagggggaaaaatccagatataatctaaatgctaggttatgtcagggtataggaacacagagaatgggggacctgtaagaactggaagagtcagagagggctccattgaagaggtcaaacataattccggaaagaattaggtagtgaggagattgtgccaggaaaataagtgggaaaggccacagttatgtttcctttgaatggaagagagacaaagctatcagctatagatcattgttttcttaagacagccaaactggccctttgaaaccattcaaattaccccagtttagctccctaccttttagtctccgtgaggaagacaagctgttgcattatcatattcctctgtgctgagcagctcaagactcagccacaatatgcaaattgctttaatgccatattacggcagttgatttagacatttgccagtgcaccaaaccatgagagattgtccgacctaatgccacctggcagatgtgtacccagagatttttctgtagctccatgtttcccataaagggcattggaaatgcacagatgaagatcttcctttggaaccaggcacatttggccccttctcagtgactgcactgtggaactcttcttaagaaaatattgaaaacagcttaatgctttcatatagtgaccgacatttagttgaaaactactgctgcatagcaaatattgtgactcttcatgtgtccacaggagctcttgtgtgggtttaaagctatgaagtgtattcacattgtgaagttttaattatctttattgaaattaattgtgtaaaaatggtatgtgctctattaggtattcagtttgtatgtgaattctatatagaaagtggtttttgttctttgagtttgttttatttcttgaagattacaataaatatctaagagactatattcctgaa

SEQ ID NO: 1305 - DNA, 2743 bp, Homo sapiens
ttgaggcaaattattttgcattcatgttatttggggctaggtattgcttaggttcgtgaatgctgttcttacagacacagatggtacctgagcccctcagacacctgccctttcagggacgttagcatgacttacatctgtcaagtggttccatacttcttgtaaaagtaaagtttgggtattgtttgctgtatcaatatgatggctttccatgcattgtctcattatccctaggatacgtgctaaaggaaaactgtcctgtaattcctgttaatatattgttaatgtcagacgtgatgtgatactgttggactgtccaaatgtacaacaatttaatggtgtttgtagaactgatatgtcttaaatgttgcatgaaatatgttataaaaatagatttgttttctattttcaacacctcagaattgagggttcatgggccaataagtgcaatatttaatgactcactcagtgtatataaactagtatgaaagagtgaattataatgaatgtgtgagatgctttgatagctgtgtgacttattcaaatgattttcttgtagctgtatttgtctagtggtgcaatttatacagtaaatatcttattggtgtcatgtaaaacccctctgtgcctacttcaaaatacttttttcttataaaaccaaacatttagtatctggaaatatgtgtcaattttatctcttagaattgtggattttattgtcaagacagaatggctgttcatttattttataaaagcatctccttctataactcaaaattgtctttaagtgtcatataaaagtgtacattttacttttaagcaactaatttagatacctaagaaaaactatgtgcattaggaaaagtcatgtttttcttctcagaaaggttgatcacatgatatgtctactaagaattttcacctctgtacttgtatgtatattttattgttactcaatcttgtattttatttacaaattcaacactgtcaaccctgggaattctaaaataccaatgtatttttaggttgtagctaatgttgtattcactttcaattctcagttgtccacactggtgatataagaggaacaaatcagaatcattaaatactttgtaatgccatcataaactcatatattcatcctcaaactcccttgtttaatgctaattggtggcctggaacttcactgagatgcaaaatcaagaactgaagcctagttgctagataacaaaaagctataaatgtttatgtatgtgaattttaaattagaataaccgtcttaaactcctacttgccatttctaaggcaaagcattcattttaatattgtactttgccttttcattcagttagtggagtaagtcatgaaacccttaggaagaaaaacaagttatgacttattcactaaaattgatgcaagacagttggttctagatgaccatggccatgtgttcatcatataaaaccttcagttctctctatggtgcttggctggagattgacatgtgaggatgtgccaatcatattaaatggatttggtctatgtgggtgatatgtggcctgaatgtaactgtgatagactgaaatttgttcttagctctcaaaatccactgaagaagtcaagtgaaggtgggtaaaatagggagattagtgacaactttgtgccaaattttttaaaaaatggaagcaggtagccaatattagaatgataatttaagggtgtggttgaattttagttagttgtcacatagttattgaacctcatatgctcagtgctgtgggaatcaaacatggaagaggtatggctcctgcccctaatgagaacaagggggaaaaatccagatataatctaaatgctaggttatgtcagggtataggaacacagagaatgggggacctgtaagaactggaagagtcagagagggctccattgaagaggtcaaacataattccggaaagaattaggtagtgaggagattgtgccaggaaaataagtgggaaaggccacagttatgtttcctttgaatggaagagagacaaagctatcagctatagatcattgttttcttaagacagccaaactggccctttgaaaccattcaaattaccccagtttagctccctaccttttagtctccgtgaggaagacaagctgttgcattatcatattcctctgtgctgagcagctcaagactcagccacaatatgcaaattgctttaatgccatattacggcagttgatttagacatttgccagtgcaccaaaccatgagagattgtccgacgctaatgccacctggcagatgtgtacccagagatttttctgtagctccatgtttcccataaagggcattggaaatgcacagatgaagatcttcctttggaaccaggcacatttggccccttctcagtgactgcactgtggactcttcttaagaaaatattgaaaacagcttaatgctttcatatagtgaccgacatttagttgaaaactactgctgcatagcaaatattgtgactcttcatgtgtccacaggagctcttgtgtgggtttaaagctatgaagtgtattcacattgtgaagttttaattatctttattgaaattaattgtgtaaaaatggtatgtgctctattaggtattcagtttgtatgtgaattctatatagaaagtggtttttgttctttgagtttgttttatttcttgaagattacaataaatatctaagagactatattcctgaa

SEQ ID NO: 1306 - DNA, 377 bp, Homo sapiens
gcatgtaattaatttcctccaaacagagagagtggaggggaaataaattttgcaagcattctagataacagaaatgagtcattttaaaacctcactcagagctcgagttaagatcagaccatctagctagtggacaaattgaactttctatttgcagttctcttttactttctgactttcttttaaattactgcagtttttcaaaacactatcctcatggaatgacaggaccaagaatagaaaatgagactcaaatttcaccatttacttcccatcagcaaccattactggtggagtttcaaacagtcattacttgctgaaatgaggtttgaggttacctgtgtatttcattcacctgtgttaatatttccttcatc

SEQ ID NO: 1307 - DNA, 377 bp, Homo sapiens; identical to SEQ ID NO: 1306

SEQ ID NO: 1308 - DNA, 45 bp, Homo sapiens; identical to SEQ ID NO: 853

SEQ ID NO: 1309 - DNA, 102 bp, Homo sapiens; identical to SEQ ID NO: 856

SEQ ID NO: 1310 - DNA, 10115 bp, Homo sapiens
ctgaacctcttctttacaacgaaatgatgctcaaggtattgtagcattttatgtgacttacttaaattgcttttctagcagacttcttccttcctcaatttcttcagttgccctctccttttaagaactacctgcttctgctttaacttttctttcaacctgtgggctacctaattaactgcatggtggctttcattactgttttacaaatgagatacatgattctattgtacaaagttaggaagggaatgaattatgacaagttcattgaattttaaccccctagttttatgtgtccattatgacgctgccagattgcatttctgttaatctatttactgtcaccaccttctgtataagataagctttttgaggcaggaaccatccagtattgacttggcagtcttgagagcttagaacagtgctggactcatagtaagaacttgtgggccgggcacagtggctcaggcctgtaatcccagcactttgggaggccgaggcggatggatcacgagatcaggggagatcgacaccatgctcgctaactcggtaaaacccggtctctactaagaatacaaaaaattagctgggcgtggtggcaggcgcccgtagtcccagctactcgggaggctgaggcaggagaatggcgtgaacccgggaggtggagcttgcagtgagccgagatcgtgtcactgtactccagcctagcgacagagcgagactccgtcttgaaaaaaaaaaattgtgaaattgatttgttcagtggctttatgttattctttaacttaaataatcactgtatttaactaaacagagatgcaaatgccatgagaaggtcaagcagatcagaagatattttggaaatagatgaacgcaaggaccacagacagctgagcagctgtgtgtttattcccctcacgtttcgttccttcaggggccagggacagccatgtgttctttggcacacagggtgctgttcaggacttccagaggattccagggctccaccttcctgtatcaccagcagcacggtctcatatggatggatggtgcaagtacctccagggctccatgtcaccaccccacctcccccactgctccccagtctcacattcctccataagacacccctgggtcagatctagccctgaagagatgaatgatcaatcactacatgcccccagctgtggggtttgtgggggtgagaagagaggtttaaaagaggtagttttgcttagagtcagggatccaatcaatatttgaaactcttaagtttaaaccctttcttcctctctctttctgcccctaaaaatattttaactgcaatttctagcagcgtgaaaatcaacattattgttattcttccaccctaatctgaaacctttgtgccaccatcctttctctctcccagccatcttctctcctgctttcgcccaccccatacacccctccacctttctatcaaagccctcagagacataaaaaatagcccatccttttgaaaatggcaagtgttccttgacttgataaacctgacatgaggctctgtaaatgggactagtcagtgtccaggttgaaggacgttcagctaggcacgggttccatctctgtagctctgtcctggcactgagctcagtatcaaagaaccccagataccccaggtcccctaatccaatagcccctcaccctacagctaagatttaaaaatgaagtatctgatgttgagagagacaaattaagttgtgcaatgatgtagtaaccagaacaagaaagggaagcaatccaatattcactaggtggtgagcagatagtgaaacctgacttaagagtggatgtttttaactctacataatagatgctctcttgtgaaaatgtgtagaaaacaaaataacagtctacatattgaagaatttgaattttaaaagaattgcagagtactccactgcttatgaaattcaagtaatcttacatgtttttcttatctagcttatgggtagaagcagaatgagcttctccagtgggatgaacacagacacttcatattcaacaagttcacactgagcccatcatcattgcttggaaggctgctcctcttcctgtgttctctctcttggccaatggcactgccatttccccatccagaacctgggatactgcagcagtcttttcactgcccctgtctacccctctccaatccattctctacacaactgcctacaggaatctttccaaaacattagttctgaccataactctacttttcttaagacagcactttggctccccattgacatcacagtctttagagtgatgtaatgttcatcattcggtcataagctgcaaatccattctccttctcacctctgtctcctgcatgcaactccacagctgaaaggagccaaactccctccactctctcacacctcccagccttggcccttgcttccacttctacctttaccctccattctcatcaccctacactattatctgatgactactcttaagttttcataaccagatcaagtatcgatgtctccaccaacagggaagagcaggcagtggttctcaagtcacatatgtaatttaaaattttctagtattttaaattttagaaaatgtttagaagaaactgatcaattaataacatgttttatttacaccatatcccatatattattatgttgatatcaatatattgaattttttttattaagatgagaggagtctcactctgttgcccaggcgggagtgcggtggcatgatctcagctcactgcaacctccgcctcccaggttcaagcaattctcccacctcagcttcctgagtagctgggattacaggtacccaccaccacacccggctaatttttgtatttttagtagagatggggttttgccaccttggccaggctgttcttgaactgctgacctcaagtgatccatctgccttggtctcccaaagtgctgggattacgggcatgagccaccacacctggtcaatgaatagaacattgattcagcatgcaatcaatatttttaaattattgagatgctttatatcctttttttcctactaagctttcaaaaatcagtctttattttactcttatgacacatctcaatttgctgcatttcaagtgctcagtagccacattagggagtagctgccatattgtacgtaagagcaccagagcacttgagagcctcctagagatcctaatgaaaacagaatcctgtgctatgcttccagaggttccatttctggggagagtctaattttggtggtctggagtggggaccagaaatgttccttttcagcaagaaccccaggcagttctgaggtacatgttcgtctgaccatttgggacttgatagctagatgcactgattgtcgagttacacctataggggtttatgttcagattccaccacctaaaagctgtgaaaattagtaacttcagttctctaggtctcagtctcctcacctgcaaaaataactacctagagacttgtgggtattaaaagggtaatatatttgagacattcagcacagtgcctggcaggtgtctcataatagcagctgtgcactgcacccgcagaaatctctatcacacagacgaggtgtcccttgcatcctcctcccacaactctctgtgcttccctccaccaccacccatcacgcaatgctgtgtcctgtgcttgctatgctgcccctcaactcaactgagaagataaactggctgctgtgtgctcccacattactctgcctcacacatagtaggtgcttagtacacatctttttttttttagaaattaaactaaatctgagcaactgggtttcttgtagtggagcaaaactctttatgcaaaagtgcctcaaggtgtcttatagaacagaagtgtgtaagtaaagtggggtgtatccctgtcctaacactcttccctttaaagtctatcacagaaagctttgccacagcaatccatggcttgaaagtgggacacctgacagatcgtgttattcagaggagcaagaggatgattctagacactctgggtgctgggttcctgggaaccactacggaagtgtttcacatagccagccaatatagcaaggtaagaagctcaaggtctacattagagataaaacccagtgcatacatatgtgttacatttactctatacttcgttttatagacagcacttgatgtacatagcactgttctatatcatttttataatttcctatgttccattatctgagttttaatagtcatccatattctttactaagtcactgtcttaaaaccatacacagtgaggcacagtggctcatatctgtaatcccagcactaccagaggccaaggtgggcagacggtttgagcctaggaatttgagaccagccttggcaacatggcaaagacccatttctacaaaaacaaaaaacataaaaattagccaggtgtgatagcacacgcctatagtcccagctactcgggaggctgagaggtgggaggatcacttgagcctgagaggttggggttgtagtaagtcaagatcatgccactgcactccagccaaggcaacagagcatgaccttgtcttaaaaacaaacaaacaaataaacagaaaaaaaatatgctaataatatctcacagtttattattattattctctggagaaaagcctggtcaagtactctgagcagagtggggatgtatgtgagagctcctgctctccctagggtgtattagagataaacagttagtccatcttccctggtatttaccccaaggagtaaataagagtaacttcagatgtgcttccttggagcacttccggatcatgatctaggatcaagcaacgacatctcctccccctttcacaggggagagctgtgtattctacaaggatgagaggtattcaatgactagggcttctatctgtggcaaaggttcaagtaagaactatgaataatgcctccaaagatgaagaataactcttgaaatggtgacttggtatactgtattcacactatcactggttgatttgcttttgttccagatctacagttccaacatatccagcactgtttggggtcagccagacatcaggctcccgcccacatatgctgcttttgtgaacggtgtggctgtaaggaggttttcacgtcttttcaactattagataatcataataattttagagtcaggaaatatctcagaaattgcccaaattctatattttacagatgaaagaactgaaagtcagacagataaagtggcttaccctctctcctatgtagtaattcagttttcatgtttttacagtaaattgatgcttttcaaacagattgtgtagcagaggaaagaagatggaaggatttagataaaaacaccctaaggtatcccaattcaaaaccttgaatataaatagcaaaaaaatataaaacccatatccagacctaatatcttctgtttttcctgttgtggggccagtttctctcaagtaatgtgttctttattcattcactcattcatccattcaacagatagttattgagaaaggaacaatggccttatagtgtctgtattttctgaaccaaaaatctgtacttctcatctgacagatgatttttatgctttttctgtgtgtcacgggaaatattctacaagatgtaacttggaaacagacatgttgggatttccgagatatttttatgatttatgggtacaatagctcaggagattgaaagttaaagccaacggtgcattccaaagcaatgtcctgaaagcagtgggaaatgcaccagtgacagcaaatagatataaaaatctatttttaaatgaacttctggatattactgttttaatataaagaaaaagaaaatggctaggagaaagaggaataagatcttaaagcagaaaataatgatttttaaaatatatagctgaaaagttaatctgagtttgacagttattgtgctattcttacaacttctctaaaagtttgaaattatttcataataaaaaggtacaaaaacgtatggcctcatatggaataaatgacattaaacttgcagtgcaacttatttaaagggtggaggaggaattgccagccacctgattctgcagctttgtttttaaaagggaatatagatctttccaggggccacagcagagggagctcaggccaccagggcaagacccaagctccttggggctcacaagctgctctccaaggtactcccttcctctggcagaggaacagcatttcccagtgcccggccatgtgattaataatcacagccaggccaggtgtggtggctcacgcctgtaatcctagcactttgggaggctgaggcgggcggataacgaggtcaggagtttgagaccaccctggccaacatagtgaaactccgtctctactaaaaatacaaaaattagccaggtgcggtggtgggcacctgttatcccagctgctccagaggctgaggcaggagaattgcttgaacccaggaggcagaggttgcagtgagccaggatcatgccactgcactccagcctaggtgacagagcaagactctgtctcaaaaaaaaaaaaaaaaaaaaaaaaaagaaaaaaaatcacagacatttctcagattttcttttctgagaatcagatcaaaagaatctcacataaaacaaggttattactaaactaagtccttagtggtccaaaagccattgcattaagggaaaatttaaggctttttgttgctgtttgtgtctgtttatacagattcactccatggattttgatgacacgtggcaccctgccacccacccttctggggctgtccttcctgtcctcacagctttagcagaagccctgccaaggagtccaaagttttctggccttgacctgctgctggctttcaatgttggtattgaagtgcaaggccgattactgcatttcgccaaggaggccaatgacatgccaaagaggtatggagagaatttgccccatcaaaaggtagtcacatccccttcatctatcaatcattatctccgtagagctttctgacttagaggccggttcagaggaagatgttaacattagcacaggtagataagtcaatacaccagtcacatacgaaaccctctatccacatttaaagaagtgacttcaagagtgcaacctggaccgtgagattaattgggcctctcgttgcaaggtgattcatgtcattctggcattcatgggtgtactgagtattccttatttcattctcaaagcagaatctattctgagactagctagcgtccctcagactaatgaggacattcagaatatccttactctgactgttcatcctgcagataaaaaatggtcaaatgtcggccacatcatatggctcagtctcagatttatgttgccacttgctccagcctgccaggagagaagtaaattgaaatactaggtagtgaagtttcagtttcttcaaggcccacaattctcacagtgacttagatgagatctcagcaatcaatagctgttgcctttctggcaataattgtaatggtaccatttataaagaactcactatgtgctagcactattgtaaacatgttaatttattcaaagctcctaaaactctaagaggtagatgttattattatcaccattttattttattttttgagatggagtctcgctctgttgccaggctggagtgcagtggtgtaatcttggctcattgcaacctccgcctcctgggttcaagtgattctcctgcctcagcctcccaagtagctgggactacaggcatgcaccaccatgcccagctaatttttgtatttttagtagagacggggtttcgtcatgttggccaggatggtctcgagctcttgaccttgtgatctgcctgcctcagcctcccaaagtgctgggattacaggcgtgagccatcgtgcccggccttattattattatttttattattatatttttttgagacagtctcactctgtcacctaggctggagtgcagcagcatgatctcagctcactgcagcgtctgcctcccaggttcaagggattctcctgcctcagtctcccaagtagctgggactgcaggcacccaccaccacatccggcaaatttttgtatttttagtagagtcagtgttttgccatgttggccaacctagtctcaaactcctgacctcagatgaccctcccaccttggcctcccaaagtcctgggattacaggcatgaaccaccacacctcgcctatcaccattttgtgtaagaaaaactctacagagaagttgaataattttccccagatcatatagctaataaagtaatggagctgagatctgaacccagacagtgtgactccattatcaatgttcttgatgactacgctatcctgcctcctggtggttacggtttgtacatctccaactctgcttctttgcttttcagattccatcccccttccgtggtaggaacgttgggtagtgctgctgctgcatccaagtttttaggacttagctcgacaaagtgccgagaagctctggccattgctgtttcccatgctggggcacccatggccaatgctgccacccagaccaagcccctccacattggcaatgctgccaagcatgggatagaagctgcatttttggcaatgttgggtctccaaggaaacaagcaggtcttggacttggaggcaggatttggggccttttatgccaactattccccaaaagtccttccaagcatagcttcctacagttggctgctggaccagcaggacgtggcctttaagcgttttcctgcacatttatctacccactgggtggcagacgcagctgcatctgtgagaaagcaccttgtagcagagagagccctgcttccaactgactacattaagagaattgtgctcaggataccaaatgtccagtatgtaaacaggccctttccagtttcggagcatgaagcccgtcattcattccagtatgtggcctgtgccatgctgcttgatggtggcatcactgtcccctcattccatgaatgccagatcaacaggccacaggtgagagagctgctcagtaaggtggagctggagtaccctccggacaacttgccaagcttcaacatactgtactgtgaaataagtgtcaccctcaaggatggagccaccttcacagatcgctctgataccttctatgggcactggagaaaaccactgagccaggaggacctagaggaaaagttcagagccaatgcctccaagatgctgtcctgggacacagtggaaagccttataaagatagtcaaaaatctagaagacctagaagactgttctgtgttaactacacttctcaaaggaccctctccaccagaggtagcttcaaactctccagcatgtaataattctatcacaaatctctcctgaggcttaccaacatctaaatgactttgcatttggggagattcaatgatttggtttgtaaagcaagggtctgctgcttggttttcccaggaaaaatgaacaaagatggagagagtccagaaacagaactacatatatctggaaggagccttctcctgaaaattttgcaggacagttccacttacctaaatcaagatgaaacacacacacaaaaatgagtttgtaagcattcacaagggtgaaattcaactcacctgtgatttacttataaaattaatctcttcataggaattatgtgtggacttcatgagcctcaaggttttagagggatgtgaacctgcatgtatattttctgacagtggagagggctctggtgcattgtgtcaccaacagatctcctagaccatggcttattaccaagccctccacagtgcaaggggtgctactggggaatgggtgggtttaaatcctgcctctgccattcactagatgtagccttgagcatgttaccattagccctctgcctcagtttccctatttgtcaagccgaagtaaaaagcagtctggaaaaatcgcattttggctctagaacccatggtcttaagcactgcaatatatcacctttcagtataaaaatatttgaatcagagttgcaataaagaatgaaa

SEQ ID NO: 1311 - DNA, 6404 bp, Homo sapiens
  misc_feature (1484)..(1484): n equals a,t,g, or c
ctcaactcaactgagaagataaactggctgctgtgtgctcccacattactctgcctcacacatagtaggtgcttagtacacatctttttttttttagaaattaaactaaatctgagcaactgggtttcttgtagtggagcaaaactctttatgcaaaagtgcctcaaggtgtcttatagaacagaagtgtgtaagtaaagtggggtgtatccctgtcctaacactcttccctttaaagtctatcacagaaagctttgccacagcaatccatggcttgaaagtgggacacctgacagatcgtgttattcagaggagcaagaggatgattctagacactctgggtgctgggttcctgggaaccactacggaagtgtttcacatagccagccaatatagcaaggtaagaagctcaaggtctacattagagataaaacccagtgcatacatatgtgttacatttactctatacttcgttttatagacagcacttgatgtacatagcactgttctatatcatttttataatttcccatgttccattatctgagttttaatagtcatccatattctttactaagtcactgtcttaaaaccatacacagtgaggcacagtggctcatatctgtaatcccagcactaccagaggccaaggtgggcagacggtttgagcctaggaatttgagaccagccttggcaacatggcaaagacccatttctacaaaaacaaaaaacataaaaattagccaggtgtgatagcacacgcctatagtcccagctactcgggaggctgagaggtgggaggatcacttgagcctgagaggttggggttgtagtaagtcaagatcatgccactgcactccagccaaggcaacagagcatgaccttgtcttaaaaacaaacaaacaaataaacagaaaaaaaatatgctaataatatctcacagtttattattattattctctggagaaaagcctggtcaagtactctgagcagagtggggatgtatgtgagagctcctgctctccctagggtgtattagagataaacagttagtccatcttccctggtatttaccccaaggagtaaataagagtaacttcagatgtgcttccttggagcacttccggatcatgatctaggatcaagcaacgacatctcctccccctttcacaggggagagctgtgtattctacaaggatgagaggtattcaatgactagggcttctatctgtggcaaaggttcaagtaagaactatgaataatgcctccaaagatgaagaataactcttgaaatggtgacttggtatactgtactcacactatcactggttgatttgcttttgttccagatctacagttccaacatatccagcactgtttggggtcagccagacatcaggctccctcccacatatgctgcttttgtgaacggtgtggctgtaaggaggttttcacgtcttttcaactattacataatcataatnattttagagtcacgaaatatctcagaaattgcccaaattctatatttcacagatgaaagaactgcaagtcacacagataacgtcgctcggcttaccctctctcctatgtagtaattcagttttcatgtttttacagtaaattgatgcttttcaaacagattgtgtagcagaggaaagaagatggaaggatttagataaaaacaccctaaggtatcccaattcaaaaccttgaatataaatagcaaaaaaatataaaacccatatccagacctaatatcttctgtttttcctgttgtggggccagtttctctcaagtaatgtgttctttattcattcactcattcatccattcaacagatagttattgagaaaggaacaatggccttatagtgtctgtattttctgaaccaaaaatctgtacttctcatctgacagatgatttttatgctttttctgtgtgtcacgggaaatattctacaagatgtaacttggaaacagacatgttgggatttccgagatatttttatgatttatgggtacaatagctcaggagattgaaagttaaagccaacggtgcattccaaagcaatgtcctgaaagcagtgggaaatgcaccagtgacagcaaatagatataaaaatctatttttaaatgaacttctggatattactgttttaatataaagaaaaagaaaatggctaggagaaagaggaataagatcttaaagcagaaaataatgatttttaaaatatatagctgaaaagttaatctgagtttgacagttattgtgctattcttacaacttctctaaaagtttgaaattatttcataataaaaaggtacaaaaacgtatggcctcatatggaataaatgacattaaacttgcagtgcaacttatttaaagggtggaggaggaattgccagccacctgattctgcagctttgtttttaaaagggaatatagatctttccaggggccacagcagagggagctcaggccaccagggcaagacccaagctccttggggctcacaagctgctctccaaggtactcccttcctctggcagaggaacagcatttcccagtgcccggccatgtgattaataatcacagccaggccaggtgtggtggctcacgcctgtaatcctagcactttgggaggctgaggcgggcggataacgaggtcaggagtttgagaccaccctggccaacatagtgaaactccgtctctactaaaaatacaaaaattagccaggtgcggtggtgggcacctgttatcccagctgctccagaggctgaggcaggagaattgcttgaacccaggaggcagaggttgcagtgagccaggatcatgccactgcactccagcctaggtgacagagcaagactctgtctcaaaaaaaaaaaaaaaaaaaaaaaaagaaaaaaaatcacagacatttctcagattttcttttctgagaatcagatcaaaagaatctcacataaaacaaggttattactaaactaagtccttagtggtccaaaagccattgcattaagggaaaatttaaggctttttgttgctgtttgtgtctgtttatacagattcactccatggattttgatgacacgtggcaccctgccacccacccttctggggctgtccttcctgtcctcacagctttagcagaagccctgccaaggagtccaaagttttctggccttgacctgctgctggctttcaatgttggtattgaagtgcaaggccgattactgcatttcgccaaggaggccagtgacatgccaaagaggtatggagagaatttgccccatcaaaaggtagtcacatccccttcatctatcaatcattatctccgtagagctttctgacttagaggccggttcagaggaagatgttaacattagcacaggtagataagtcaatacaccagtcacatacgaaaccctctatccacatttaaagaagtgacttcaagagtgcaacctggaccgtgagattaattgggcctctcgttgcaaggtgattcatgtcattctggcattcatgggtgtactgagtattccttatttcattctcaaagcagaatctattctgagactagctagcgtccctcagactaatgaggacattcagaatatccttactctgactgttcatcctgcagataaaaaatggtcaaatgtcggccacatcatatggctcagtctcagatttatgttgccacttgctccagcctgccaggagagaagtaaattgaaatactaggtagtgaagtttcagtttcttcaaggcccacaattctcacagtgacttagatgagatctcagcaatcaatagctgttgcctttctggcaataattgtaatggtaccatttataaagaactcactatgtgctagcactattgtaaacatgttaatttattcaaagctcctaaaactctaagaggtagatgttattattatcaccattttattttattttttgagatggagtctcgctctgttgccaggctggagtgcagtggtgtaatcttggctcattgcaacctccgcctcctgggttcaagtgattctcctgcctcagcctcccaagtagctgggactacaggcatgcaccaccatgcccagctaatttttgtatttttagtagagacggggtttcgtcatgttggccaggatggtctcgagctcttgaccttgtgatctgcctgcctcagcctcccaaagtgctgggattacaggcgtgagccatcgtgcccggccttattattattatttttattattatatttttttgagacagtctcactctgtcacctaggctggagtgcagcagcatgatctcagctcactgcagcgtctgcctcccaggttcaagggattctcctgcctcagtctcccaagtagctgggactgcaggcacccaccaccacatccggcaaatttttgtatttttagtagagtcagtgttttgccatgttggccaacctagtctcaaactcctgacctcagatgaccctcccaccttggcctcccaaagtcctgggattacaggcatgaaccaccacacctcgcctatcaccattttgtgtaagaaaaactctacagagaagttgaataattttccccagatcatatagctaataaagtaatggagctgagatctgaacccagacagtgtgactccattatcaatgttcttgatgactacgctatcctgcctcctggtggttacggtttgtacatctccaactctgcttctttgcttttcagattccatcccccttccgtggtaggaacgttgggtagtgctgctgctgcatccaagtttttaggacttagctcgacaaagtgccgagaagctctggccattgctgtttcccatgctggggcacccatggccaatgctgccacccagaccaagcccctccacattggcaatgctgccaagcatgggatagaagctgcatttttggcaatgttgggtctccaaggaaacaagcaggtcttggacttggaggcaggatttggggccttttatgccaactattccccaaaagtccttccaagcatagcttcctacagttggctgctggaccagcaggacgtggcctttaagcgttttcctgcacatttatctacccactgggtggcagacgcagctgcatctgtgagaaagcaccttgtagcagagagagccctgcttccaactgactacattaagagaattgtgctcaggataccaaatgtccagtatgtaaacaggccctttccagtttcggagcatgaagcccgtcattcattccagtatgtggcctgtgccatgctgcttgatggtggcatcactgtcccctcattccatgaatgccagatcaacaggccacaggtgagagagctgctcagtaaggtggagctggagtaccctccggacaacttgccaagcttcaacatactgtactgtgaaataagtgtcaccctcaaggatggagccaccttcacagatcgctctgataccttctatgggcactggagaaaaccactgagccaggaggacctagaggaaaagttcagagccaatgcctccaagatgctgtcctgggacacagtggaaagccttataaagatagtcaaaaatctagaagacctagaagactgttctgtgttaactacacttctcaaaggaccctctccaccagaggtagcttcaaactctccagcatgtaataattctatcacaaatctctcctgaggcttaccaacatctaaatgactttgcatttggggagattcaatgatttggtttgtaaagcaagggtctgctgcttggttttcccaggaaaaatgaacaaagatggagagagtccagaaacagaactacatatatctggaaggagccttctcctgaaaattttgcaggacagttccacttacctaaatcaagatgaaacacacacacaaaaatgagtttgtaagcattcacaagggtgaaattcaactcacctgtgatttacttataaaattaatctcttcataggaattatgtgtggacttcatgagcctcaaggttttagagggatgtgaacctgcatgtatattttctgacagtggagagggctctggtgcattgtgtcaccaacagatctcctagaccatggcttattaccaagccctccacagtgcaaggggtgctactggggaatgggtgggtttaaatcctgcctctgccattcactagatgtagccttgagcatgttaccattagccctctgcctcagtttccctatttgtcaagccgaagtaaaaagcagtctggaaaaatcgcattttggctctagaacccatggtcttaagcactgcaatatatcacctttcagtataaaaatatttgaatcagagttgcaataaagaatgaaa

SEQ ID NO: 1312 - DNA, 4529 bp, Homo sapiens
cgcagcacagtcacatcctactgaacatcatcctgttctctggggtgagtgctgtcctggaagttggggggctcagaagctgttggtgcccacctgggaggtcgcccttgcagctgctatcctgaatctcttgcccaagggcttcctctggccacaagagtgtgggaagcaagtgagagacccctgccagtagaggtggggtctgtttgtccccccactcagcttccttgcttctggctcaggggacagtgggaaggtactttctgcgagttgtcccagaggcctctagggggttgggctcctgttgcccactgaggagacctgctcatctaccttccttgtgtcacttcctcactccttcccagtgtttctagaatcacctcccaaatatcccacttgcacccaaaaccttgtcttgggtcagcttctgggagccgacctaagccagcagctataatgctcagggcttaagagctttggaatcagatggacctgagtgtgaatcccgcccctgccacttaacctgagtgtgaacttgggagcctgccccacctctcggaacctcagttcctccatctatgaaaagggaacttacgtgcagaaaaccaagtgactatgagggggatggggcagtgtgagatgacgggaccagagcacgttcctggctgcagaggccacaagtcacgctgtctctgagaggtatggggacaggggcgcagaggaagaatgatcgcgagtcctcagccctgtttggctgacgggggacagggatgggtgggaaagaggtacagcgtttttccaccttccccacccatcacccctgagattccaaatgaacatcgggaccaaccccgggagcccagcggatgttcagggtagggcaaagaacaggtgccaagtttgctccctggggtgtgagactgggcagcctcaagagctgcattggtaggactttcaccaggtagacagcaggcacctcgcccctgcagatcacagcttccagggccacctgtccacagaatcccttcactgatctgtgcttgaggcaggggtgtgtggactgggagtccttcttttactctgggtggggcctcatgctcagagggagctctgtctacccccaccacaaacctgcagtttccctgctacagcgatggcaacctcagccacctggctgcccaggcccccaacctgggttctccctcttgttcccatggtcagcccatcagcaaactcatccacatgtccaagggtccacccccactaccctgccctgccctggtccagctaggatgtttgcagtcgtctcctcattggtctccctgcctcctctctcgccttcctaagccagaggaattctgtaagagctcaagttagatcctatcccttctctgctcagaaccctctatggctcccaactcactcagagcagaagcccacagggcctgcaggatctctgccctggccccgcctgacctcactgcctctcccttctctgttcacccacagccacggtggcctcatctctctgccataaacttgccaattatcctgctgctgcctcattgacttcgcacccactcttccctctggaacagaggacactctcgccagctctccccatggcggatccttgtctagggtcaggcctctgctccaaagtcacccctggggacaccttctctgaccagcccctcattcctatggcctcatgctgtttttatttcttcctaggacttagcacgtatcctagaaattaacctgctggtatatcctgtttcttgtctgtctctttccagtggaatgtcaccatcgcccaggtggggatttttgtgtgttttgttcactgctgtacacccagcccccagcacagcgcctgtccaggacaagtgcccagtaaacacttgggaagcaatgcaagcgtgcgtgcatggataagtatttctttggcagatgagggggctaaggttcagagaaggccctgggggtctcagactcatagcccagtgctctttctgctgacacgccctggtctctggggcagtttgttgcctgttcagcaacaaagagggtgtgcctcgttaggggtcctgcgtgcgaatcgcagtccctgcgtgtcttggctggaggtcaccaccctctctgctccagggcctgtaattaccacttaccctggtcaatgggtccgagagattacccttgtaggcagggctgtggccagggtgctcacctggcccccagcaggtcccatgggcactgtctggccgggcttcatggctgacattccaggtacatttctagccctgggctgccatgggcagagggtggggagagggtcgtgggcttcaggctggacaaaccagtcagccttcccagctgggccgcctgaccacccacttcctgtggggctccttgaggcctggagggtggagggggtctctgttcaacccccacccatgccctcttcccttctctccctcggcaggtcctcccagcagctcctgcaaacagacccccgacccaagcccttccttctgcctccactgccaccactgctgctcatctctgctggcacagaagtctcttccctggtcttccagaaatcccctctccacactcagccagagggagctattaaaactgtgggccagcccacatcagtccacagcaaagtcctctctaagggatctctgttgcttggagaataaaccctcggattccttccttggctctcggggcctcctctctgacctccctctgtctcctctcccagccttcctcctcactcaccctccagccatgctggcttcctccttgctcctgaaacagcctgaggcccacactgccccgggccctttgcactggctgtttcctctgcctggaacacttctcctaggcatccacagggctccctcccacaactccttcgggtgcccacatgggaagccatccctgaccacccccccgacttccttctgagcaaggtagggtctttctacctagtcatgagggcagggatttttgtctgttgtgttctctgtgtgcccccagtgccatcccagtgcctggcagatggtaagtgctcgacacacattggctgactgcctgaatgaacaactctatgagccgatggcagataaggacactgaggtcctctggggtaggtgaccagcccaaggccacacagctggtctgagattaggccaggagaggagcccgggttggtcacatcctggagttggcgtcttggaaactgcatcaggagaataacaaagatgagacgcaggctctaacaagtggataccagtgactctcgccccgccagccccagccctgcagccttgggcccttccaggagtcatggtctgcctgcctggggcattccaggcttcgacccaggtcctgcactttctattttgagcctcttagtcctgaggactgtgtgttcccagcaggcggcgcgggccagaggctgagcctgggtgtggctgtcaccctatctggggccagagacccagattcccgggcccttaacctgttggctgctgagggctctggcataagccctgttccctgcttgattgtctccccttcaagcccctgccctggtatcgtatcggcccatctcaccttggattatatccctgtttggccccatttgaatcctggctctgcccctttccagcaatgtgaccttgggcaagtcacttcatctctctgggtctcagtttcttcatctgggaaatggggacaataagagtacctgtctctggccatgtgtggtgactcatgcctgtaaccccagcgctttgggaagccgaggcgagagaattgcttgagaccaggagtttgagatcagccctgggcaacatagtgagacccctgtctctacaaaattctaaaaaaattagccgggtgtggtggtgtgtgcctgtagtcccagctattctagaggctgaggcgggaggattgcttgagcccaggagtttgaggctgcagtgagctatgattatgcccctgcacatcagcctgggtgatagattgaggccccatctctaaaaataacaatactaataataaataaaaatgaaaatgagtacctgtcttctggggttgcagaggagattcaatgtgatgaaattgatgagagtgccctgcagggagccggaaactcagggagcatcgataatgagtcccccaccatcagcagctggcttaaatataaaaactgtcatggcctctggagaaatgacaagaattcgaaggagcttccctgcactggccaccctacaccctacacccttacttcctcccctcaacttgcctggatttatcgacccccactaccccactggttgccttctctccacctggcacatttcgtatgaatttgcttgttggttcttgcctatctccccagtagaacattagctccttcaggacagggacttttgtctaccttatgcacctagtgcaatgcctggcacacagtcggtgcttaataaatgtttcttaaaagaaccaataaa

SEQ ID NO: 1313 - DNA, 3030 bp, Homo sapiens
tcacccacagccacggtggcctcatctctctgccataaacttgccaattatcctgctgctgcctcattgacttcgcacccactcttccctctggaacagaggacactctcgccagctctccccatggcggatccttgtctagggtcaggcctctgctccaaagtcacccctggggacaccttctctgaccagcccctcattcctatggcctcatgctgtttttatttcttcctaggacttagcacgtatcctagaaattaacctgctggtatatcctgtttcttgtctgtctctttccagtggaatgtcaccatcgcccaggtggggatttttgtgtgttttgttcactgctgtacacccagcccccagcacagcgcctgtccaggacaagtgcccagtaaacacttgggaagcaatgcaagcgtgcgtgcatggataagtatttctttggcagatgagggggctaaggttcagagaaggccctgggggtctcagactcatagcccagtgctctttctgctgacacgccctggtctctggggcagtttgttgcctgttcagcaacaaagagggtgtgcctcgttaggggtcctgcgtgcgaatcgcagtccctgcgtgtcttggctggaggtcaccaccctctctgctccagggcctgtaattaccacttaccctggtcaatgggtccgagagattacccttgtaggcagggctgtggccagggtgctcacctggcccccagcaggtcccatgggcactgtctggccgggcttcatggctgacattccaggtacatttctagccctgggctgccatgggcagagggtggggagagggtcgtgggcttcaggctggacaaaccagtcagccttcccagctgggccgcctgaccacccacttcctgtggggctccttgaggcctggagggtggagggggtctctgttcaacccccacccatgccctcttcccttctctccctcggcaggtcctcccagcagctcctgcaaacagacccccgacccaagcccttccttctgcctccactgccaccactgctgctcatctctgctggcacagaagtctcttccctggtcttccagaaatcccctctccacactcagccagagggagctattaaaactgtgggccagcccacatcagtccacagcaaagtcctctctaagggatctctgttgcttggagaataaaccctcggattccttccttggctctcggggcctcctctctgacctccctctgtctcctctcccagccttcctcctcactcaccctccagccatgctggcttcctccttgctcctgaaacagcctgaggcccacactgccccgggccctttgcactggctgtttcctctgcctggaacacttctcctaggcatccacagggctccctcccacaactccttcgggtgcccacatgggaagccatccctgaccacccccccgacttccttctgagcaaggtagggtctttctacctagtcatgagggcagggatttttgtctgttgtgttctctgtgtgcccccagtgccatcccagtgcctggcagatggtaagtgctcgacacacattggctgactgcctgaatgaacaactctatgagccgatggcagataaggacactgaggtcctctggggtaggtgaccagcccaaggccacacagctggtctgagattaggccaggagaggagcccgggttggtcacatcctggagttggcgtcttggaaactgcatcaggagaataacaaagatgagacgcaggctctaacaagtggataccagtgactctcgccccgccagccccagccctgcagccttgggcccttccaggagtcatggtctgcctgcctggggcattccaggcttcgacccaggtcctgcactttctattttgagcctcttagtcctgaggactgtgtgttcccagcaggcggcgcgggccagaggctgagcctgggtgtggctgtcaccctatctggggccagagacccagattcccgggcccttaacctgttggctgctgagggctctggcataagccctgttccctgcttgattgtctccccttcaagcccctgccctggtatcgtatcggcccatctcaccttggattatatccctgtttggccccatttgaatcctggctctgcccctttccagcaatgtgaccttgggcaagtcacttcatctctctgggtctcagtttcttcatctgggaaatggggacaataagagtacctgtctctggccatgtgtggtgactcatgcctgtaaccccagcgctttgggaagccgaggcgagagaattgcttgagaccaggagtttgagatcagccctgggcaacatagtgagacccctgtctctacaaaattctaaaaaaattagccgggtgtggtggtgtgtgcctgtagtcccagctattctagaggctgaggcgggaggattgcttgagcccaggagtttgaggctgcagtgagctatgattatgcccctgcacatcagcctgggtgatagattgaggccccatctctaaaaataacaatactaataataaataaaaatgaaaatgagtacctgtcttctggggttgcagaggagattcaatgtgatgaaattgatgagagtgccctgcagggagccggaaactcagggagcatcgataatgagtcccccaccatcagcagctggcttaaatataaaaactgtcatggcctctggagaaatgacaagaattcgaaggagcttccctgcactggccaccctacaccctacacccttacttcctcccctcaacttgcctggatttatcgacccccactaccccactggttgccttctctccacctggcacatttcgtatgaatttgcttgttggttcttgcctatctccccagtagaacattagctccttcaggacagggacttttgtctaccttatgcacctagtgcaatgcctggcacacagtcggtgcttaataaatgtttcttaaaagaaccaataaa

SEQ ID NO: 1314 - DNA, 713 bp, Homo sapiens
gggagaggagccctgagctcacctcctgcccccagcccagggctcttaggtgcttgttggtgtcaggcccaggcccccctctcatcaagcagccaataaaactgccctggttggcgttctcatttcacagatggagagactgagcccagagagggagagtcacctgtctgatgtcacacagaggtcagcatctgggctgggattccagcccaggaccatgtggggtggggggcagtggatcaatcttttcctggagggagtcaatggtgatggtgggaatgggtcaggggtgctggcaaggagggtccaaggcccccaggagggagggaggcatgggagatgagtttgtccctcttgagttctgtctctctctgtgtctctctgtttctgcctctttctgtctccttgtatttctcagtccctgtcttcgtctatacctctttctctcttccttgtgtatctgacccactgcccaggaggggatgcaggcagagacccctggcttgggtcctggagttggggcccacgaggggattgacatctggggttgagctgggaatctgaagccagaccctgcagccagggacagcattccagtctcggctccacactccagggatagccttggaacgccaggcagttcagagagcctgaggtctggtcttggagacctgggttccaatcccagctttgccacattccagccatgtggc

SEQ ID NO: 1315 - DNA, 1063 bp, Homo sapiens
gggagaggagccctgagctcacctcctgcccccagcccagggctcttaggtgcttgttggtgtcaggcccaggcccccctctcatcaagcagccaataaaactgccctggttggcgttctcatttcacagatggagagactgagcccagagagggagagtcacctgtctgatgtcacacagaggtcagcatctgggctgggattccagcccaggaccatgtggggtggggggcagtggatcaatcttttcctggagggagtcaatggtgatggtgggaatgggtcaggggtgctggcaaggagggtccaaggcccccaggagggagggaggcatgggagatgagtttgtccctcttgagttctgtctctctctgtgtctctctgtttctgcctctttctgtctccttgtatttctcagtccctgtcttcgtctatacctctttctctcttccttgtgtatctgacccactgcccaggaggggatgcaggcagagacccctggcttgggtcctggagttggggcccacgaggggattgacatctggggttgagctgggaatctgaagccagaccctgcagccagggacagcattccagtctcggctccacactccagggatagccttggaacgccaggcagttcagagagcctgaggtctggtcttggagacctgggttccaatcccagctttgccacattccagccatgtggccttgggcccttagcctttgttcctgtaaaatgggaccactgagagcccgatctcagggttttatgaggaggaacgatgagagggctgtgctgggcttcctgaagccctgtgtggcctggaaagcactcaatagatgataactcagtgtaatgatttcttctagcagatggggaaagcgagagttaaagaggcccgatcatttcactcactcattcctcaaacgttattaagcacctgctatgcaccaggtgctttgttttgtatccattaactcagggttcagcaaactacagcctccaggccaaatctggttcacagcctgtttttataaataaagttttattggcaca

SEQ ID NO: 1316 - DNA, 2837 bp, Homo sapiens
agacacgaatgcagagtttgagtccagatcccaaagcccagtacacaagtgtctacggagccctcaagaaaatcatgcggaccgaaggcttctggaggcccttgcgaggcgtcaacgtcatgatcatgggtgcagggccagcccatgccatgtattttgcctgctatgaaaacatgaaaaggactttaaatgacgttttccaccaccaaggaaacagccacctagccaacggtattttgaaagcgtttgtctggagttagaaagttctcttcttcaacacgtccctccccagggtgttcctccctgtgacccagccgcctcgacttcggcccgcttgctcacgaataaagaactcagagttgtgtgtgcaatgcacacccagacacacgcacgcacacacacgcgcgcgcacacacatgcttttttctgttcccctccgctttccgaagcctggggagaaatcagtgacagaggtgttttggttttattgttatgtgggttttcttttgtattttttttgtttgttttgtttttaaacattcaaaagcaattaatgatcagacataggagaaaccctgaatagaaacaaaacttttgaatgctggattcaaaaaaaaaaaaaagttatctggacagcttctttgagactatttaaaaactggtacaacaggtctctacaacgccaagatctaactaagctttaaaaggtcaagaagttttatggctgacaaaggactcgcgcaacgcagaaggcctttcccaccttaagcttccggggatctgggaattttacccccattctcttctgtttgtctgagtctcatctctctgcaagcaagggctgaaatcattttgtttggttgttttgaaggaaagaggcggggtgggggggtgcaaatctgccagcagctcttacgtaaggcatgttttattggggagggctgagcttttattttctcctctccagtggggttggcttttattgtttcttgtttgggtttggaatggaaatatggatagcagcataaagtacttttattttgacaaaattcatttttttcaacaatggagacatagatttgacccacaataacttctccccctctctttttactctgctcaaaaagcatctctcctcccattacccaaccttggtcataagtgtgcctggctggtttgcagatatttgttctgctttgtaaaaattggccattagtgcatttattgagatgatctctaaagaggtatgccctgacctacccctgattttatgacattggggcccttcttttgctgaaactgccttacgtaatggttttactccttgaaagagatttgacggaatccattttatgccaagtgctgccctgcactgtttctgcaatatgtggtgtatgctgtggtgatcttgctgggaatgattataagtgtgtgtgtggtgggggagtgggtattacatgcattgctgaagagtcatcctggtgttcctcattcctcccaccttcccgtggtcattttaattacggggcagtgtcaccgcaaagggaggaaactcaaagccgaaagcaaaattccaggcctgattctggcttttgaggttcctggttcttgaagccaggcctgacccgactctcagatggggtcagtcccgtcgctttgcagactgaccctggaaatctacaaaatgcagattttcctgatttcctcttcttttgcccagttttttttttttttttttttttttaaagcctggattgtaaccagattttcttttttcccccttctcagctgtaaatatgatatctcctttcagggccccagcttaagggcaaagtgagttaatgtgtagacaaaggcgagggacaagagagagttaacatctaaacagtggaaaaagccatggtgtgtggtttctgggaaccaccaacacttgcaggtttagctttttcccagggttgactacaagaaagaaaaccatgtttttgcaagattaaaatgtggttgagtgtgcctaaattaaccatccccatttttatcatatttccaccatcacttcagggttttaagagtcagtgctcacctgggcggagctggtagtacattttgcttcttaaaaagctaagtcctgggttccgtctgattttaggttccaggaacttcctgagaacacccgatcgcagagggtaattttctggagtttgttttgcagggatagctgggagtatggccaccctgctccacgatgcggtaatgaatccagcagaaggtaatgtttcatggtcccagggaggggcagtaggggatgtgcaaaggggcacaaaaaatggttgtgggagagtggagaggactgaaggtgggcagagcggctcctattctccagtcagagcagacaggagaattgaattttttactacgttatcaaaggcctcaagaaaggacgtgaacataagagtttttggtattcctgtgctcggagctactcaaagtgtgttttacagaccagcagcatcagacatcttgaggggtgttggaaatgctaattctgaggctgggtgcagtggctcatgcctgtaatcccagcattttttgggaggccgaggtgggcagatcacttgaggtcaggagttcgagaccagcctggccaacatggagagacccccatctctactaaaaatacaaaaattagcctagtgcggtgtgtgcacctgtaatcccagctactggggtggccgaggtgggagaatcgcttgaacccagcaggcagaggttgcagtgcaccgagagtacgccactgtactccagcctgggccacagagccagactccatctcaaaagga

SEQ ID NO: 1317 - DNA, 2201 bp, Homo sapiens
agacacgaatgcagagtttgagtccagatcccaaagcccagtacacaagtatctacggagccctcaagaaaatcatgcggaccgaaggcttctggaggcccttgcgaggcgtcaacgtcatgatcatgggtgcagggccggcccatgccatgtattttgcctgctatgaaaacatgaaaaggactttaaatgacgttttccaccaccaaggaaacagccacctagccaacggtattttgaaagcgtttgtctggagttagaaagttctcttcttcaacacgtccctccccagggtgttcctccctgtgacccagccgcctcgacttcggcccgcttgctcacgaataaagaactcagagttgtgtgtgcaatgcacacccagacacacgcacgcacacacacgcgcgcgcacacacatgcttttttctgttcccctccgctttctgaagcctggggagaaatcagtgacagaggtgttttggttttattgttatgtgggttttcttttgtatttttttttgtttgttttgtttttaaacattcaaaagcaattaatgatcagacataggagaaaccctgaatagaaacaaaacttttgaatgctggattcaaaaaaaaaaaaaagttatctggacagcttctttgagactatttaaaaactggtacaacaggtctctacaacgccaagatctaactaagctttaaaaggtcaagaagttttatggctgacaaaggactcgcgcaacgcagaaggcctttcccaccttaagcttccggggatctgggaattttacccccattctcttctgtttgtctgagtctcatctctctgcaagcaagggctgaaatcattttgtttggttgttttgagggagagaggcggggtgggggggtgcaaatctgccagcagctcttacgtaaggcatgttttattggggagggctgagcttttattttctcctctccagtggggttggcttttattgtttcttgtttgggtttggaatggaaatatggatagcagcataaagtacttttattttgacaaaattcatttttttcaacaatggagacatagatttgacccacaataacttctccccctctctttttactctgctcaaaaagcatctctcctcccattacccaaccttggtcataagtgtgcctggctggtttgcagatatttgttctgctttgtaaaaattggccattagtgcatttattgagatgatctctaaagagctatgccctgacctacccctgattctatgacattggggcccttcttttgctgaaactgccttacgtaatggttttactccttgaaagagatttgacggaatccattttatgccaagtgctgccctgcactgtttctgcaatatgtggtgtatgctgtggtgatcttgctgggaatgattataagtgtgtgtgtggtgggggagtgggtattacatgcattgctgaagagtcatcctggtgttcctcattcctcccaccttcccgtggtcattttaattacggggcagtgtcaccgcaaagggaggaaactcaaagccgaaagcaaaattccaggcctgattctggcttttgaggttcctggttcttgaagccaggcctgacccgactctcagatggggtcagtcccgtcgctttgcagactgaccctggaaatctacaaaatgcagattttcctgatttcctcttctcttgcccagtttttttttttttttttttttttttttttaaaagcctggattgtaaccaaatttttttttttcccccttctcagctgtaaatatgatatctcctttcagggccccagcttaagggcaaagtgagttaatgtgtaaacaaaggcgagggacaaaaaaaagttaacatctaaacagtggaaaaacccatggtgtggggtttctgggaaccaccaacacttgcaggtttagctttttcccagggttgactacaaaaaaaaaaaccatgtttttgcaaaattaaaatgtggttgagtgtgcctaaattaaccatccccatttttatcatatttccaccatcacttcagggttttaaaagtcagtgctcacctgggcggagctggtaatacattttgcttcttaaaaagctaagtcctgggttccgtctgattttaggttccaggaacttcctgaaaacacccgatcgcaaagggtaattttctg

SEQ ID NO: 1318 - DNA, 462 bp, Homo sapiens
ggagatttagggagagctgatgttacagtttgagtctgaaggcagtctggaggcacaatttcttccttgagagagaccccgtttttttctcacgaggccttcagctgattaaatgaggtgtatgtacccacagtatacaggttaatctactttattcagagtctactgatttaaatgttaatctcatttagaaaatcccttcatacatacatctaaactagtgttagatcaaatatctgggtactgtggctcatccaggctgacccataaaattaaccatcacacctgtgcaagcgcttttccctcctggatggtgtcctagggatgacagaggaggggaaagccaggtctctgcttcaaggagacaaaattatgcatacgaagaaattaagaatgctgctgtgtctgtggagtagccattcttttattcctttactttcttaacaaacttgcttttactta

SEQ ID NO: 1319 - DNA, 836 bp, Homo sapiens
gcaaatctcttgaacccaggagttcaagaccagcgtgggcagcataatgagaccccgtctctatgaaaaatacaaaaattagccaggtgtggtggtgcgtgcctgtattcccagctgttcggaaggctgaggtggaaaaattgcttgagtttgggaggttgaggctgcaatgagtcatgattgcaccactgcactcagccagggcgacagagcaagactgcctcaaaacagaaaagaaaacaaaggctaattctcaggctctacaccgaaactactggatcagaatccctggagctagggaccaaaatctgtttattggtgattctgttgcatgcttttgcactattctaaaacctatgtgtgcatacacacacacacacacacacactcactctcttagcccttgttaacccttatcgatcctaagacaaatgtatggggaacccatcagaggctattctttagggctagtgttcaatttgactgtttttaatatgaaagattatggatcacatttcaaacagatgtgaacgtggagagaataatacgatgtaccgcagtgtgtccatcactgttcttcagaaattcacattgggtcattttgttttagccatctctttccacattatcttctttttgttcttttaaatttcgggggtaatatgaagcaagcctcagctgggcagaccagagtctgttccctttttatatatcccggcgtcttagccagctcgtgtctgaatagtgagtaccttttgggcctggcactgggcaggccttcagctgggtcattctctacctggcgatggctttaggtgagttgtggagctcttttc

SEQ ID NO: 1320 - DNA, 462 bp, Homo sapiens
ggagatttagggagagctgatgttacagtttgagtctgaaggcagtctggaggcagaatttcttccttgagagagacccagtttttttctcacgaggccttcagctgattaaatgaggtgtatgtacccacagtatacaggttaatctactttattcagagtctactgatttaaatgttaaactcatttagaaaatcccttcatacatacatctaaactagtgttagatcaaatatctgggtactgtggctcatccaggctgacccataaaattaaccatcacacctgtgcaagcgcttttccctcctggatggtgtcctagggatgacagaggaggggaaagccaggtctctgcttcaaggagacaaaattatgcatacgaagaaattaagaatgctgctgtgtctgtggagtagccattcttttattcctttactttcttaacaaacttgcttttactta

SEQ ID NO: 1321 - DNA, 522 bp, Homo sapiens
cttcctcaaaagtatataaaatttgaaaagacctagaagtgatctagtggaatgaagacgctgaggtaccattgaggttggggaaactactgggacgtgcttacaggataaactgcaaaacaaaagcacaagtttgtaatcatggaatgacatgccttattctgaaaacttaacgtttgtagcgtaccttataattcataagacatttaaaaatggtattgaatcccaataacctatgcgtagggttggatcttgttgttatccctgttttttaatggaaaatctgaggcctgaagatggtaggccatgtatatgcctgccccgccgttgagcctggctcctgctgttggagaaactttcccagtctgtagagagaggatgtggtcctggcaagcctggctcctgcctgattctgtatcttctggtaacacacagccgtcatttaaaaaaaaaaagacaaggtctttccctctgacagactaaaagctgaatccgcttatttcgaactctgccttgaggcgg

SEQ ID NO: 1322 - DNA, 607 bp, Homo sapiens
ctcaaaaatacttcatccatttgagcaatatgaaagaataggctagagagaaacagatttggtttttcaagctaaaaagaataacagaaagtgggcgagtcttcagtgagctgtctgcctttgaaacctaggaagtaaacttaatttggatgtgcatttaggagatgaagcactacaggtggtgaaatgctctagcaatgaagcagggaagggagaggggggaaaggaaatttgagccaagcaacctgaaggtcaggggaagccggtcttacagatgttaagggaggaatccaagtaggcaaaggggatgaacagcagtgcaaaggctctggggcagcaggttgcccggtatgttccagaacaggaaggaggccagtgtggctggcatggagagctaaggctcaaaggagaaagtgaagagaaagaggtagtaagggaccaggaggaattgagcccggccagccgtgctactgatgttagcccacatgtcacagtgtgtgagggagatagagtccttgggaacaataatatgcagagcttttaaaaactttcatactgtagccatcaattccatcatcatggtggtggtatccctgggtggtggtgg

SEQ ID NO: 1323 - DNA, 741 bp, Homo sapiens
tagagatcctggcttcacaggaaagagccaagggcatgggttttgctgagggcgtaagagcttggggaaggtgagggctaggtgtgtacgggtgccctgatgtcctcttagcctgctggtgaggaaagtgcatgtttaataaatgggctccagccaactgtgtgcagttatttgtagcctgcataattttaaaaatgtggttgagcatttaggtctatcttcagaatttaggctccatttgacttagttttcctgaaatatgtagaaaactaatggtgaaagaggacctaattcttgaattatctgcttgaactgtgttgctagttattccaagtagaatttgtaaaatggtccatcattctctaagcaaaatgagggaaataacaattattttctagaaatttcatatatattgaatattacaaaatcatgtaactagaaatgtttaaatggtcacactgggccaggcacggtggctcacgcctgtgatcccagcactttgggagaccaaggctggtggattacaagatcaggagtttgagaccatcctggccaatatgatgaaaccctatctctactaaaaatagaaaaattagctaggtgtggtggcgcatgcctgtagtcccagctgcttaggaggctgaggcaggagaatcgctggaacccgtgaagcggaggttgcagcgagccgagattgcaccactgcgctccagcctgggcaacagagcgagactccatctc

SEQ ID NO: 1324 - DNA, 313 bp, Homo sapiens
tttttttttttttttttggagacagagtctctctctgttgcccaggctggagtgcagtggcgcgatctcagctcactgcaagctccacctcccgggttcacgccccacgccattctcctgcctcagcctcccaagtggctgggactacaggcgcctgccaccacgcccggctaattttttttgtattttttagtagagacggggtttcaccgtgttagccaggatggtctcgatctcctgacctcgtgatccacccacctcggcctcccaaagtgctgggattacaggcgtgagccaccgcgcccggcctaaa

SEQ ID NO: 1325 - DNA, 47567 bp, Homo sapiens
ttaataatttatcttttattgaaattgttgaatactttatattacagtaaagttgattgaaaaaaaaatgaagagaaaaatcaattttaaaaaatacactcatgttgaaatcaaacaagccagccaaaccggtacaggctgagggatgctgcagggcggtttgcttctcagcaatagaacaccagagtctatatacaattctacaatgcgagaaaagtcattcactaaacatggcaggaaaggcgctgccgccagaataagaacaccagcagcgcctccctcctcctccatgctgtgaccgcccggcctccctcctcctccacgccatgcccgcctggcctccctcctcctccgcgctgtacccgcccagcctccctccagcatgaggccaagtgcaatgctagggccgaggctctggcccatgatttttcatgcagtttctgtaagtcacacactgtgcaaattaaggcttcttataggtcgaatggttgatcaacacttttttcttaaaaaaataagcacagtaaaggtggtatcatgagaacctgaagagatgagacctataccccaaatctggaaaaaattcattttctctgacacctcaactccactcacacacacacacacacacacacacacacacacaaacacacaaatcaatctttgggcaggttgtttgaattcaccagccggcaaaaatactgacaaatgtgctctgtacgcccaggcttgaagatatcatgcaaaaaggtgcagccattcctgactaaaggcatagaacaggcaaactctccaaaacctaggcactcggggaccctgtgcacgtatgtgtgtgtgtgctcgcacgcacgtgtgtgtgcccttaagaaacagaaagcaaaagagaaaagagacagaatgagctccaactcaggggacacattaatgaccagttcaacatcccgccggaagctgccccatacactgacagcctcaccatctcaagatggacaaactggtacatcacacccctgctggcaggaagaaacggtggctgtttttttttcctttttctcaaacctgagtaattgtcaaagtcaataaatagggggagagaattaaaatgctaaaatatatcggggtcaaataccctatcgggactaaagcagcaagggtttcttcgaatgcagccctctgttttgagatgcgtccggccttatgcttttaaatgaggacttggggcaaaaccctgggcacaaggtaccgccctgtggccgatctgagccatgccttattccaatgactgtaaacaatcaggaaggagtggggcctgacctccttcaccctctcccccatcacaaaaactcttcccttttgaaagtttctgttaaaggcaaaattatagaagcatcatcgagtggaagtcttatttggttggaggtgcttggctgtcccgcggctccgtgctcccctgcaggcactgcggagtcagatgtgtaagaggtcctcgtcgctgtcgtcatggaaggacaccagcttggtggagctcactgtcttctgctgtgcagagctggacttccctttcctcgccttctcacccctgaccagccccaccctatcgtcctcacgctcctgaagggcattgctctgtgcgtttctcactgggtgggagctctctgccccagctcccctgcccgagtgaactttcacctctgggatggtcagaacctcatcctcactgtcctggtcatccccatgcagggagctgagggctttcactgacttggtggtaatatggccgttctcctgcccttcctttccctgccgtggaggaggcagctggatctcttccatcagccactctgtttcattctcatctgtctcttcttccttattcacctgccagggatcaacagcagagaccacgtgagccccctaagagaccccattctgctccaccatccaccacatcagggatgctctctgctggcacgagctggggaagaactggcccactgtcctcacagtcactgcatctccagttcccagggaaaggaagacgagggctggcaacaccttcctgttcctaatgagactgcaccaaggcaggagggtttgggagggtggcagtggggtcatttggcaggagtctcacagccaagggtgggaccaagcagaaggcgttcgggatggcctggaccgaaaagcagaccagtgatcccccagcgcagctgggggagaaggggctcttccgggctactcatagactgaaaggtgcccactgcatggcaggggaggaatgtcaaaggagggactccagtcaaaagcctagttttagagagcaattcatcattacccatcgagaccacaaacattatgtcctttgatccagataatgcctcttttctgcaaatttacctgaaagaaatcatccaaatgctacatgcacaactatcttcactactgtgtgtgtgtgtgttttgttttttttttaaagaacagccaaaaacagtggaaacaacctaattattaaatacttcaaggaaatcagttgtaaccacgagagaaacttgagggaaaaaaataacaaaaaaatgtgctggcgtaagtggctgaggcaacgggtgttgctttcctttctggattccagtcagcctgtgactgctttccttggcacccctgatgagaacgacatggacagcgcagcacagggggccggggaggcaggccttcaagagactcgccacagaaaattacctttgagtatttgtaggacacgttggaacttctcctacagcaagtggtcagcttacttatcactgtttccctataaaaaaaaaggagacaataattactccagtgtagagagggcatgggcaggagccccacccccgccagccccacccccatctgcaccaccagggggctggtggtggctgcatttctcccacattctgaatgacaaatgagtagccgtgacaggttatatataccctaatgtatttgttgtgattgagtggaaagaagatgggctttggaatccaacagcagagggccctctagagcaacttaacattagggcaaggactttttcacatgactaacaggaccacaccagtccgtcgccactaagcctgcccaatggtggctcgcagagacagacatcacatgcccttcccggcccagaccttcttctgccccattctgcattttgggtgtagagggccacaatcggtactttttttttttttttggacagagtctcactgtgttgcccaggctagagtgcagtggtgagatcttggctcactgcaacctccatggttggtactttctgaccacctctctcattggcctgtggctcagctggcaaatgacagtggcagcagggaacgcctgagctggccagctcctgcccccaggtcagagccactaacactgacgcctgacgtgaaaatctgcttgaccgtcacatggagagtcctttcacccagcaaagtggcgcaaaaggatggcatcatacctggtacatagcaggcgcttaataaactcctgcatttatgatgtgaggagggcagaggggtcagctgctcagtgggaaaaggcacccatgaaaggtgccgtttaatgttctactcatctttggacacaaaggaccacggtcctagaagccgcaggcacgggtgatgtgcgagggcctcggccttggtcagacagaaatgcaggcatttaaaaaccacaacgctggggactgcttccagagagttttggactaagaacctcgagccttcgctgctgtagggcttaaaaacaaataaataaaaccccacaaaactgaccccaagattagctatgggaggcatgcatccacccgccccacctcgccctgccacccgcttacctcctctccttcttgtagagcaacagggccagcaggcagcaggtgagcgccaccagcagcaggctgagcaccgcgccgactgcctggctccgttctgacagccccttgtgcatctgcccgtcgtccccgggattctcgctgtcaaagcccaccctgcaaggacgtcacagaaaaggagccgtgtcacagggtggtcctgctgccacagccacaacctgagacctgagtccccaaggcaagagcagctctgactttcccaacaccatgtgattcttactcctgcccagaaaacaaggccacaagtcccactccacatggaagagggctgcaaaaagttcctgatgatgagtttgtggcagggttgtcagaaagcagacaagaaggcactgcttccagctccatgaactatcattcacccaaacacagaggagacaggcaggagggacgcggccccctctaggtggcccaatccacggcaggactaggctggggcagaggctgtcccgaagcaccacacttctctccagggtcagagctctttcctctcagaatttcttctggaagcagtgagcgcagcccaccatgagacaccatctccacacgaaaggggcccagggggccttagaaacaggccaggacggggcccaggggcggccacagaccagggtggggcccagggagcagcagagcccagcacagcccccgacgggtctcctctctccaagcctgctccatcccaggagaaggctcttgagcacaccagctgcctcaccagcggagttcaccattcccacccaagacccacatgcacacttgtgggaaaaagcagtgcgtttccatgacatcgaacactcaagcagagttgggacaataatagaaaatgagaaacaaccacggagacttccctttgcgcttagggagcaagatgacactcaagagtgtaacgacttgacacttctaatctctctggccctctgtcacttggggccacacacacaggaacaggatcacataaacagaaattcctcctgtgctgctggtgataagaggcaaccccagcggggcgcatcttgtgctgctgaagatgccggctgctcaaagaactgaggttgagggcaacaggccaacccgcggcccagccgcaagggctgccgctctcaaagttcagcttaagccaaacaatctaaaacatcagcaagacaagaaaccacagggacagcctggcgtccagttctaggtgggcctgcaagggttgacctctgctcagaaagaagcaccaccacactccacagacaggtctgagagctatgcagacctctccctccaagccagaaacccactcacccagaagcagctccagccactcaggaccactcgaaatgcatccaagagacacatcatcactcagttctaagcgtattttactttctacctttgatttcttctttggaccatagattattcagaagtgagttttagtcttcaaacgtatttctatttttcagttgtttgttcttggttcctaacttaattgcatcatgtatgtagttaattgcatcagtcagaaatctgctgacttaggccgagcacagtggctcatgcctgtaatcccagcactctaggaggctgaggcaggtggatcacctgaggtcaggagtttgagaccagcctggccaacatggtgaaaccccatctctactaaaaatacaaaaattagccaggaggtagtggcacacgcccataatcccagctactcaggaggctgaggcatgagaatcacttgaatctgggaagcagaggttgcagtgagccaagatcgcaccactgcactccagcctgggcaaaagagcaagtctctgtctccaaaaaaaaaaaaaaaaaaaaaaaaaaaaaaaaaaaaaaaaaaaaaaaaaaaaaaaaaaaaaaaaaaaaaaaaaaaaaaaaaaagggaaattgctgacttgcctgctttgtggttaatttttgctaaagttttctaagtgtttgatgtaagcttgggcaaacagtgttctcccaacgcagggaacagtgttctgcgcatgtctattaaatcttgcttttcactgtgctgtctcaatcttccaaaaaaagctttactctttgtctactcaacccagcaatcactaggcttgtttcttgtgtgtggttttgtcaatttctgctttacatatcaaggcttttttattaggtagatggaagtttaggattcttgtatcttcctaggaaattagcccttttaaaattataatgaccctctttattctttatccctaatatttttctttaatatcctattttatcttatattaacataactactgcagctttctttcagattattttctggtatatcttttcttctcctttgactttggtcttttctgtatccttgttttaggcatgttccctgtaaacagagttgtttttgaaatccagtttgacaacttgttttttagctgacaagtttagtcaagctatacttatgattatagatatatttagatttatttctaccatactgggctgaaatttctacttatctgatttttgttttatttttctccttgcttgtcttctttggggatttaagtatttttacttctccttttcttctccgctgttttggaagttacatactatatttatattattttagtggttattcttaaaatactggcatgcatactaagacaggaagtctaacagtatgtcttccaaacaattaggaactctaccttttcttccttccttcatttctttcaagaaaatggttttactttcatatgatgctatcactgtaagaaattttaaaagctgggaactctgccacccctctcagcttagacaccactgttgtccagtacagtgtgtcctcatagggtcgctgacagtttccttcaaactgcaaccttccgtgaagcgactatgggaggtcctcgaatgacatcatttccttcaaaactgtctcattataaagttgatgaggccgggcacggtggctcacgcctgtaatcccagcactttgggaggctgaggcaggcggatcacaagatcaggagatcgagatcaacctggctaacacggtgaaaccccgtctctactaaaaatacaaaaaaattagccgggcatggtagcgggcccctgtagtcccagttacttgggaggctgaggcaggagaatggcgtgaacctgggaggcagagcttgcagtgagccgagatcgcgccactgcactccagcctgggcgagagcgagactctgtctcaaaaaaataacataacataacataacataacataacataacataacataacataaagctgaggaaaaaaaactggtttcattatacatcatttcacataaagttgcagtttccaagaacctatcgatgatataaagtgaggatttaaagtattttaacctttcttgaattattttctaatacaacaaattagcctcccctaaagcttttacagtcttttctttgtatctgctctcctggtatttcataagtgggtgggtcttgtcatcaataactgtgctgggcacatagcctgccccttccatctgtagatgcctgtcttttagctttgtgtaaattttttgactttaatcaaatattgtgaaagaaccatttttgtaaagtaggaggaaggtgtaagacagctctatcttcatctactattgcaggaagtcaacagatgagatataggatgttaatttaaaatactgaggtaaattccagaagaaatagctaaaagaactaaaaatggtaatctattagggcgaacattgctacctgtttgttatagttacatgattttttttcctgagatctagtctcgctctgtcacccaggctgcagtacagtgacgccatctcggctcactgcaacctccaccttccaggttcaagcaattctcctgcctcagccttctgagtagctgcgattacaggtgtgcaccaccacacctggctaatttttgtatttttagtagagacggggtttcaccatgttgcccaggctggtctagaactcctgacctcaagtgatccgcccaccttagcctcccaaaatgttgggattacaagcgtgagccaccgcgtctggccatatttacatgattctacaatgtacaacactgataacatttggggaaaaaaaaatctcaggcactattccacgtcacccccgggtggtacctgcatccctcaaaatccaccatctgagtttttgctcttggtttcaacttctgtttcttttttttaaagtccttattaccttgtcagtgtgttaagggatttaaacagctcccaatcctgatgttctgaacatcatgaaaccgaggtttcctggagaatcttcctctctggttttagagtcaaacaccaaagccctataaacagtgcttttcctactcacagaagtcgaactctaaacattcaacatggacgggatcctagcctggcctggtccctcaaacccacacagaagaccagctgccatgtcaggaggcaggattcatctcatggcagctgtagcctctccatgacagagaatgcagggaaagttcacttctgggttttatcttttataaaaattcacattttgcttctttcaggaagaacttccagtttcaatcctttcattttgtaatgacgtcaccggaacaccataaacattcaaaagctgaaaataccacaagtgaaatttcaaccaaaagcctctttccctgactgtgcagctgaggatccctaagtacacaggcctgaacagcacaggacaaagctggtttttgctgagctcatgtccactgttaagggtgggcagggggagtgctgatttaagatgtaaaatgtgtgatcttcattcccccatgacccccaccactgtcgtctgctgactctacggtccctttttcaggacatgaaggaaacaattacatggcaagaattcatgttcccccaatcttaaagtctcaggacagagaatgaaaagcttatgtaaaatggtgggccaggccgggcatggcagctcacgcttgtaatgccagcactttgggaggccaaggcaggcagattatctgaggtgaggagttcaagaccagcctggtcaacatggtgaaaccccatctctaccaaaaatacaaaaattagcagggcataatgacacatgcctgcaatcccagctacttgggaggctgaggcaggagaatcgtctgaaccaggaggcagaggttgcaacgagccaagaccgcaccactgcactccagcctgagtgacagagcaagagtccatcccaaaaaaataaaaaataaaaataaatataaatacaatgatgggtgggggtaacataagaagaaaataaatccaagaggaaagcaactgacaacatgttattcgtggcaaagtataaaacggctgtgggacacaagacaaccaatggaggtgccaccttccttcagagcagaaactgctccctctgttctcatgctgattctcaaaatctggagagtaagcttttcattcattcaaacaaacgtaaaaatactgcactcaaatcaaagtaaaaatactgcactcaaatcaaagtgaaactttaccaaacaatcatttgtattacgacacaaaagatgttccaggattacacagaggaggcaccaccagtacttgcctcccaggagctaaggagagggaggcagcaatgggaacagggtagagggacagagctggggtgccctgactggaccctattcggggcatggtacacacaaaggaaacaatggcactgctgctgggggtggtgggaggtgacgcagccatggaccaaaaatcagtggcaggatgctgacaagcaacggagcggggcactgactatgtggggtccgcttctatcattttctctattttttggtgcatgttctgaatatttcacaagaaaacattggggaaaaaacacacatacacttattcttaagggaagatgtggggtacaagtgctaagcttccggatgtcatactcaccccagaggacacacggctgaggtgtaccaagagaagaggtactggcagtcggcagtctcgtgactgaactcggggatcccgtcctccaccagagggtcacagtggaagaagatggtggaagaaacagacttggtcttatcctttccgcacttagaggaagaggcaaacacgacatcgagatcgccgtctgtcaaacgggaagggcacacatggcatgtcaccatcatttttcacgagcagactgagcttagctccttacggtctaaaaagtttgcaaagacttaaaatcaggcagaagagacttcatcccacgtcccacaggcactctgttcacagcttacgaggccactcgatgcacatggatagagccctgcccttagtcagcatgcagtaaagaatttttgttttgttttaaccacgagtatttattgatggactgaagacacaattttaatggaacaataaggcacaaccgtggattaaaacagtctgctgtacagccaaaagaagggaaaagctacaattttaggaactttaaatatgcaaatcaaggagcctctgaagtatctaacagatcagtatcagatattcttccctttctatataattcctgtattacatcactcaatcacaaagtccaactgacacttcataaagaattcctcattcatttatatttgagccatccagcctggctactcccctgttctccactgttttccatcgctttgcagtgtattttttagcaatccccttcctaaagaattatgtacacatcttcaatagctttccaaagcaaggaaacaagcaagcaagcagcgagtcaagaaagtcagccaacggcagatatgtgaatgaacagactcacagagacatacattaggatggcaacagcctgattcactgaagtctaaactaagctgactttggcagaaaagttgctgtgacttgcttaaagacttggaatgccaccttaggttgtgctactagtgccagacctcttgtttctaagggattagcagtggtctacacaaggagctgggaaaccagtgtaaccagggagctaatgatacaacagtcaacgctttggacttgtataagaagcggactatggcttctagcattaacatttgccaagtgtaaaattcataaagaattttgtgcaaaacttcaagacacagagaacaatctttaaatattttggactaggatacattaggcacttccataacactaatctttctaacttggaaacgtatagtgaaaagcattccagtgcacataacactgaggcataaaccatgcagcagaggtgtgaatgcaggaggcttcacagggtgcgcagcctccttgttcaaaaagccatgagaaagtccccaagcatattgtctgagcagccgttctggtggtaaccgtgtcccaagactaagcaaatctgcaggcatattgctactttttgaatagtcaacactgcactaacaagagacgccccataggtacaaagttgagaatcagaggccagaggtagagtgacgtgggcaagcaacctaaaagacttgactccacacctctcaccaaggccacctttcaagaatatctccacccagcagccctttgatgacagagaagagtgcagaggatgatctcatactcccgagagaagtgttggttaccaaaaagctcctggagaggcaacatcccagagggcctttttttttttttttttttgagatggagtctcgctctgtcgcccaggctggagtgtagtggcacgatcttggctcactgcaagctctgcctcccaggttcacgccattctcctgcctcagcctcccgagtagctgggactacaggcacccgccaccacgcccggctaattttttgtatttttagtaaagacggggtttcaccgtgttagccaggatggtctcgatctcctgacctcgtgatctgcccacctcagcctcccacagtgctgggattacaggcgtgagccaccacgcccagctccagagggccttttaataatgaaggtagataaaaactgccagaccaccgaactatcgagccaagtcagaaatacaataccaggcatagcttggggtgccaagtagaacagaggagattctgaggcttcacaaaaagcagaaagactgcatgactacgtgaacagtatgttgaatgtacacagaagtgggaagcaaaggacatataaaaaggatggagaagcatgctggcagactcgccagagggaaggcagcaggtgcagtctacatccagtgaaagagctttgctggcttgttcctcggcaggattccctatcttactttctcagactggatggatgtgtggcattcagcagcagaacagaggaagacgatatttataaatgaagaactggcgaatggatactgagaagaaatagactgggtgtaccattctgtaacgccctgtttatagaccaaaagcaggtttgtgttgacagaacatatttggggttgttatgcaacagcagtagtactttgggagaaggggaatgatggggtggaggtagggctggtggacaggaggactgtcaagttccagtacttaaatactagactgcaaggaatagtttgctgtctgtcctttagtgaagaaatcagatgctcattttctgttctacatccaccttctccaaaaccttagcaaagtctgtgataaagatatggcactgtccccatgctgatcagcctcctgaatggtcctgtctgcgatactgcccagctgcttatctgagatatttatttggaccatcatgcacagcacccttaacagctcatcacgagagatcttgttatctttatccaaatcatatagtcgaaaagcaaactgcagtttgttgcttcggctgttgagtggttcaggtccattcacaactttgctcttttcattatcctcaatggtttggaaatgagccagagtttgcaggaatccacggaagtttacctggtcctctccctctggaaggaaggcattgatgatccagtcccccactgggttgatggcaagttctggaatcccctggaaatcgtcctgttctctcctttgtccaggttgctgaaccggctgtacagacgtgtgatttgactgtgggaaaagccagtctccttcttgatctcctcaaactcttcatcgtgcagtaaggtggaggcctgagaccccatcactgtgccaggagctcctccaggaacagaagcaacggcaacaagagggaaggcaagaatttaaccttgcccaaaaagagggctggccttgctccttggctaatgacaggatacggagcaggggctggccatgcagtacctgagtgatcaatggaccaatcctgcccatgtcagagccccgggaaaaactctggacaccaaggcttggggaagcacctccggctgatgatactccatgtgcactgccacacgtgggtgctgggaacacaacacatctgattccacgggagagctggtgggaactctgcattcaattccctcctggactctgccctgtgtgcatcttggttgattttaacctgtatctttttgctgcagtaaatcataactataagtgtaactgcttccagggagctctgtgagttatggtgaaagggtaaatctgaagttggcttgggaaccccttcagtgtgctgttgctgtcagaagtgaggaacccttgtgtggactccttgcatgaactctgctgctcccaacctttgtcactggctgaaaatctttgtggctggtgctgctgggtgccaggaatgcagaggcgagagtgcagggtaggagacggacatgtccacacacagatggggcccagagacaggcggtgcggctccgctccgggagggccccacattctcgcttgggagtagctgaagcaggggctgctgaatggactgttccacagggctgatgtggggaagcaaaccgcccagcagctccacgtcctgatgagagacagctctgccctcccgaaggaatggcaagcctcaggaagagatagaaacttcatttcttcatgaaagatgaaaagatgtcttaaaactaaagctacttcctggggctggtgaatgaagaaagtgaaaaggtctgaaagggattttatttaccaagaatgactaaatgcgcatgcacaagcactctgaaagctggggatcctcaaaggtctgctagacataccacttgtgaacgtggaggtcttatgtgtaaccagacaagtggccagtgctgcgcgatggagcgtgaagactcctgcagacacaccagcagtatcacctgctatgagaaggtgggccttcccaggaggggcactggaggtaggtttggaatcctgcagacacaccagcggtgtcaccctgctatgagaaggtgggccttcccaggaggggcactggaggtaggtttggaatcctgcagacacaccagcggtgtcaccctgctatgagaaggtgggccttcccaggaggggcactggaggtaggtttggaatcctgcagacacaccagcggtgtcaccctgctatgagaaggtgggccttcccaggaggggcactagaagtaggtttggaaggatgaggaaggtgggccaaggcattccagcaccaagagcagcatatgtaaacccaccaggttacagggtgactttgggaactagtgaataacctgatggctgaggcatgtgtaggagcagcagcttgcaaggctaccctggtacatgggagcctctcagacatcttcaagctgtgtcagagagagcctagactttccttctctgcatgatagggcccctgaaggcttctgaaacaatccttccttccttcctttaatcaagatttaccgagcactgggaaagaggacagcaagagaaggcacaacctgtgacatgcaacatctgattctgaatgactgaaggattcaccgaagtgtgaggaaggcagagaacagagaaacacagagtgctagctccgtgctgtggagttatgcaagtgaatgaggctgatcaactttcccatcatcaactcacccagaaagcagaacattcactttcccagttctattcaggggccacaggtgctatgagcagatgcaccagggcgctgtctacaatctgtgaccaggagcagcgatgctgacccagcttccctccatcaggtgctgccgtcgtggagatgcactcagcaccagggcacggagcacctgctccttctcggcgatgcgctcagcaccagggcacagagcacctgctccttctcggcgatgcgctcagcaccagggcacggagcacctgctccttctcggcgatgcgctcagcaccagggcacggagcacctgctccttctcggcgatgcgctcagcaccagggcacggagcacctgctccttctcggcgatgcgctcagcaccagggcacggagcacctgctccttctcggcgatgtgctcagcaccagggcacggagcacctgctccttctcggcgatgtgctcagcaccagggcacggagcacccgctccttctcagccgcaccagggcacagagcacccgctccttctcagcgatgcgctcagcaccagggcacagagcacccgctccttctcagcgatgcgctcagcaccagggcacagagcacccgctccttctcggcgatgcgctcagcaccagggcacggagcacctgctccttctcggcgatgagctcagcaccagggcacggagcacctgctccttctcggcaatgtgctcagcaccagggcacagagcacctgctccttctcagctatcactactctcccctcccagaggacatgatcggcagctctttgacatcagagcaggctggggttttctttaaacacacttcatttttttttaaagagttattacatccacacacggttcaaaaatcaaattatgaaaggtatatagttaagactagctgttcaaaacaaaagcagcctttcacgattatgtgagggaacaaagggcaacacccttattagtgccagtttaaaaccttccttcacaccctggactctgccctatgtgcgtcctggttgattttaacctacatcctaacatttaggccagtttcctttcatccttcttacaaatataaaatctcttacccttctctaatattatttggcattccaaaataaggaagtgtcatggttaaaaccaaatcaaaggcaattctgactgtgcacagctcagcctccacccaacctcagaaccactggatcagaccaggttttagtttttttgtacatttacttgataactaagacacaatttgcctacagtgaaatgcttagttctgacacgtatcgctcaatccactgtcaagaaattcataacaaagtaaagaattagaccaaggtttttgttttaaaagtggtccgagatttcaactgaagggagttagttgaaaattttaatccccttccttggaggaagttaaatgtggaactttgtgggaagccacggattaccttgaaggtagtacttggtcttgtcagaggttccaactttccgactgaagtgctgatcgttgggcttcacctggcatatgttggctccagagcacgccgggtttctggagcttgtgatggaggaaagttggatctcatacaggtagttgtccccattggtcctcatgtccccagaggctctgaacagcctgaagagacagaaaagatcacagtgacatggaagtccttcaagaaggcattcatgacataaaccctcagtcctcagaatcactgcagggccccaggatgcttcctttcctagggaaaggaagcacggacacgctagggcagcacgtctgtgaccccacagcaattctgaggacaccagtttccctctcaagaggctttctccccaaccagttctggcctctgagtgctaatccaccttcctcaggtgccgtatccagcaccacacggccctcgccctgtctgtgcacctcggccaccacccccaagagcagccccagtaacactgctgagaaacttattttctaaacactggtaagcccagaagattcctgctcaaacatgtcagaaggcttcggcttcaacccctgagattatcatgaagagagggagaaggacgggggatttatttttacactcatgagaattcaccatctttggtgttaaaacttaatgattgagtaacgcttttcctcagtttaagcaaaagatgacgatgactccagcaacagtaactaaaacacagacctatttatcctgcagtgctccccgatagggaaagagcggcattgctggtttaattttgaacacatttcacagctcagaaggaaaacgttttacttacttaaaataaatatctccgaggctgaagctcttgccatttatagggttggtgatggtcccattcaccatctgcacctcctgaggcttcacggcgcaggcagcccgggagtcccagctgaagtagtaagtgcagctgtcgatatcaaacctaggaggagggaagcacaggctacagtcacttccccagccagacataagggaagactgcaaaacaatgaacactgcggagcccttgaagcagctcactggctttcagtcaaggtgctgcgagacttcagttgggtcccgaggcccccactccccgggctgcgcaggcctaggcagaatttcccgactcaacactgacggcagctcggagcgagggtggttattttactcacttcttttcatcaccacaatggacagggaagatgactgtggtgcacacatcagtaatgtgacaaagcaggcaagcattcaatataaattttttaaaatttgtaaaccgtgcaacattcaaaacctggaaaatttgctcctagatttttagatttttgtttaagcttctcagactcatacattcataaatcctttggcaatttctgagtcaccccttttccaaactcagcgtctggaaggaatcagttctgttcacaaacagcagctcacatgcaccctctgttggccaagctctccctggcaccagatgcaatgtggccgggaaaacttgaatataatccaagcacatcccaggtccagatgcaggtcccagctgctcgagggtcccagccaggctgcttgaacacctcgggtgggacaaatccacgcccctttgtttctactatgacattcaaaggtagaggtcagttaagtactgctcagccagtgctaaacctagttcaagagacaagctagcccagagaagttgcactggtcttgtaacagtgtctcagcactgtatctggaggtcttccctgcctggagcagccccgcccaatacagcacaatcagcggctctggccctgagctcctaagactcagccaaaacctgcccatgaaaaccccaaggaggaattccctccagtatgctcactgcacagtcccgctctgagcccccagtctcctgacctcttgaatgcaggtctgcccaccgtctttgtacaggtcaattctatcacggaggatgcggtcttatttccaccacacggataacctttggagtacgtgacaacaactttgtcacctgaaacacacaaatgattgaactgacattatttctagtgcattataaaaagcctcaggcaggcgcagtggctcacacctgtcaattccaacactttgggaaaccaaagagggcagatcacttgaggtcaggagttagagaccagcctgaccaacatggtgaaaccccgtctctactaaaaatacaaaaattattcgggcacggtggcaggtgcctgtaatcccagctactcaggaggctgaggcaggagaattgcttgaacccgggaggcagaagttgcagtgagccaagatcgagatggcgccattgcactccagcctgggcaacaagagcaaaactccatctcaaaaacaaaaacaaaaaacaaacaaacaaagcttcaatgttaggagtaaaaatctggtttaaaggccagaagaaaataaattttgggctccctaaaggtttatcgacctgttcttgcattcccacactcaggggtggtcacctggcccactgcacaattgtcacagcctaagacctggggtcaaacccaaaccctcctactcccgtactttgtggccctgggttgctgagcttctgagccttgagggccttacctgcagaacagggcactgtccaaagtgggcaggtttcgggcatgtatagaaagtgcccaacaaactcatgtgaacagtgggaccccgggtaatggcagccttcattatcgctccaattgtgtaaactctctctatcatattaggtgctttcctgacaggtaccctcatgtgagcctcccagtaataacagagcacagaatggaaaaagtgaaaagccagaaacagaaaccaactgtggttttctagggtcttctagctttcagtcgagcactgtctgcttttaaaagtgacccattaaaagaaaaacctgagccctcgaacccgcagggtctgagagaaaagtgagtacatgctttaagctgcaggtatcactggggcagcatggccgccaggttccaactctcaagccaccaccaagaggctgcttgtggctgcgcagggggctgttctgggaacggtctgggcccagcctggctgcatggacagatgatgtctccagggcatggcgcagggtgtccaggggaagcaggtgccttccaccctgaccacacacacacagatccttccaggcaggggcatgcggtggaggcaacatgggcacagtgctcacttcccgagtgttttccacaggacacaggctgaggtactgagggctgctggatggtgaggtgggaggtgggactctaggctctcaggcctgccccaaactcaaagctgctccagctgaatttgttttaaatattgggcttctgtgtaaaattttggaaaaaagaattccactgttttacggaaaatttttaaaacttctggcatatgggatcaaacaagaaaaaactttaatagtgtagacagcccttactgattgggcaggaggctcaacctcctcggctcaggggcccagcctgtgaaacggatgacaacgctgccccatggagtggatggggattaaacatatattaagcacagctgcttgagacatgttggttctgaaaacaaaaagtctacctcccaccccaacaggggtccattccctaagcggacaatgggggcaccgtggttgtccttagatgctgtcttgttggcgccaaagattaagagctcatttggtgtcagacaccagattatttctcgttccggtcagcaggtgctcaggatgccaaatgccagtcccaggagaaagcatgagctcttcccgccaggcgaggctggacttgcaaaatggtgctctccaaatggaggtggcctgcaggtcaccgctaagaagtcagatgatctagttccatgtcaccccctgtgttcactactctcttttgctcctcctgcctcaaacttttaggaagccttaagtgttttagtcatttcagttggctgaagttggggaaagactagtcgaatatccatatatactgcaagattacaggggaaaaagcaaccctccacgaccttccctccttcccccttctggggcagtgtgggagtggcagcaataactgacctctaaagcagtaagaacctcccagggagggcgggtctcaggctggcggtctgggcgccacttcctgtatggcagctctccctccacctaccaacctgcagagtctgtgtgtgatttttatcaagggtggcagtagttttctcggaattctctttctccatctcaacatctcaagctaatctgaagtagccctgtggctgaatcaggacaactcgggaaaccccactccagcctaagaggcaaaggtgaatattttcctttactggtccctccaacaaatcctaattgctcttactaagaaacctctattttcctcctttaaataatgaaagaaaacaactttcactcagcaaccaagtacaagatcaatttcccgtgaaaaattgttaagacattttacaaagatgtacctctgaactacctgtaccaagtcctcatgcaactgtttggctttcctaaacaaacacgtgtgtttatgccaatttaggcacttgatctacagctagaacgtgaacttcagaggaactctgaacattctgagacttcctcctggatagacgcacttccccgagatagcccaacccctctaaacacacagactaggacctgcagtctcatataatacaaagcagcacttattttaatgtgccaggagagccaaaatgcctgtgagacagtgacaggcaatcatatctggaggtttccaccaaagcacatgctcactctccttgccatcctgagaacaccctcaccttcccggttcagatgctgctccttgaaccaaggaccaggacccacaggccttacctatgacacccagcttctgcgtgtgaacgagtcccaggacctggacgtcaccagttgtggtccttctgcaaatgctggccctttcagagcagcccaggggccctttatatattttctggcacagatttatatagtacctagaaaacgacacaaaggggcaggtaaaaggcatgcaagtgacgtctctgccctgacacaggagggctcttcactttactttcagagaaaggttctgataactaagggctccattccatcactgaatgtagcactaaaatagcttttccaattaaaaaaaaaaagggcaaaagaagtcttcactgaagaagggagctcaccaaccagacacacgcggagtggaatgtccacacctgcggccaccctggacacagcgtggtacagtagaaagaagggctccggggctgggagaggcagtggctagaatctcggcaagtttcccacctcacttagaaccacttaaaccctgtgagtccatgcccctgctcctcggtgatgtcttgcaggagcacctggccaagcgggcgctccccacgcagagtggtcaggaccatgggctgaccccagccagcaaagcctaaggagctcctgccaaagacccgagaaaacccacacgcctcccacaacctgagctacacacaaacgcaaatcaaacccagcctaactcagtccgcccaggttcttccagctccagaggctccgtttccagtcaccaaagctcctgcccccactctgacctcagaaccaccctctgtgccaggattgacactgcgggctgcttccaggaacagtcacaactcaaccaccatcagcctcacatgggcatagtattcccatcttgagaacccaaaagagccaaccatcgtcaagcagtctgaagttcacatgctgagggtgtggcgccgcgggtggactgggaaggcactcacgagactccgttgtggacgagggaccaggacccggtgagagaggagagcagccgcaggtcgtaggttttgtgtttctggacgaatttgcactccaacttctttggagggcagacaacttttgttttccactcaaatgtcacatcacacccacgcacttcactgaagacttgtggcctcccaatgtcctcatcttcatcacacttaaatatgatgctggatgtccggtagctgtttgctggggagtgtagggaaaagagagagagatcagactgtcactgtgtctatgcagaaagggaagacataagagactccattttgaaaaagccctgtactttaaacaattgctttgctgagatgttgttaatttgtagctttgccccagccactctgccccagccactttgacccaacttggagctcacaaaaatatgtgttgtataaaattaaggtttaagggatctagggctgtgaaggacgtgccttgttaacaaaatgtttataagcagtatactcggtaaaagtcattgccattctctagtctcaataaaccaggggcacaatgcactgcggaaggccgcagggacctctgccctggaaagctcggtattgtccaaggtttctccccatgtgatagtctgaaatatggcctcgtgggatgagaaagacctgactgtcccccagcctgacacccgtaaagggtctgtgctgaggtggattagtaaaagaggaaagcctcttgcaggtgagatggaggaaggccactttctcctgcttgcccctgggaactgaatgtctcggtataaaacccgattgtacatttgttcaactctgagataggagaaaagctgccctgtggcgggaggcgagacacgtttgcagtaatgctgccttgttattctttactccgctgagatgtttgggtggggagaaacataaatttggcctatgtgcatgtccaggcatagtaccatcccttaaacttaattatgatatagattcttttgctcacatgttttttgttgaccttctccttatcatcaccctgctctcctactacattccttttttgctaaaataatgaaaataataatcaataaaaactgagggaactcagaggccgatgccggtgcaggtccttggtgtgctgagtgccggtcccctgggcccactgttgtttctctatactttgtctctgtgtcttatttcttttctcagtctctcatcccacccgactagaaatacccacaagtgtggaggggcaggccaccccttcaggggagcagaggcgggagaatgtcagaccaaggcctgcaccagggcacgttcctgcacgccttccccatgctgcctcaggagcacctgcagactccatccgccatctggcaacacaccacgtgctgccctggccacatctcatgttgattcactcatgtgtatcctgactccaaatagacccagctccttggcacacagcctttcatcgtacttcttaataaccccacagccctaggtgattcctcacacgggtattcaatatttgaccaatctactaatgatcacgaaaaaaaataagatagctgggcgcggtggctcacgcctgtaatcccagcactctgggaggccgaggtgggcggatcatgaggtcagcagttggagaccagcctgaccaacatggtgaaatcccatctctaccaaaaatacaaaaaaattagctgggtgaggtggcgggcccctgtaatcccagctacttgggaggctgaggcaggagtatcacttgaaaccagaaggtggagcttgcagtgagccaagactgcaccactgcactctagcctgggcaacaagagcaaaactccatctcaaaaaaaaaaaaaatttaagataataatgtaatacctacaagtacttgaaaacaggagtgtgattcagaaaatagggaataacgttttgtcaaaataagcctcaaaacaaagctatagcaatccttcgtaaatttaacacgtttggttccttaatacatcccattttggtccctggactattgcgggaagtcagggaccatgaacggagggacctgctgaagccgtgacagaagaatatacattgtgaagatttcatggacatttatcacttccccaatcaatattataatttcctatgcctgtctttactttaatctcttaatcccatcatcttcgtaagctgaggatgtatgtcgcctcaggaccctgtgatgattgcattaactgcacaaattgttcgtaaagcatgtgtgtttgaacaatatgaaatctgggcaccttaagaacaggataacagtgattttcaaggaacaagtgagataaccttaaagtctggctgactgtgggccggtgaggacagagccatatttctcttattaccgaaaacgggtaagagaaatatcgctgaattctttccccagtaaggaattttaataattaacagccctgggaaaagaatgcattcccgggaggaaggcaggggcgcctcttaaatggccactctaggggtgtctgccttatgcagttgcagataagggatgaaacacgccctggcctcctgcagcgcccccaggcttgctaggatttggaaattccagcctggcgaattctagttaaaccggttctctgctcttgaaccctcacaatgtgtgcacagtgggacatggaagttatttagtgattctagtttcgcgctgaccttgtgatcctgccctgaccttctgccttgtgacctcttgtcatccttgaagcatgtgatctccatgacccacaccctattcgtacactccctcccctttgaaaattgctaataaaaacttgctggttttgcggctcgggggcatcacagaacctgccaacatgtaatgtctcccccggacaccagctttaaaatttctctcttttgtactctttccccttatttctcagaccggccaacacttagggaaatagaaaagaacctacgttgaaaaatcgggggctggttcccccgatactggacatttatgaaaattagtaatttttcttttttttttttttgagaccgagtctcactctgtcacccaggctggagtgaagtggcatgatctcggctcactgcaagctccgcctcccgggtacacaccatcctcctgcctcagcctccccagtagctgggactacaggcgcccgccaccacgcccagctaatttttttttttttttgtatttttagtagagacggggtttcaccatgctagccaggatggtctcaatctcctgacctcgtgatccacccgcctcagcctcccaaagtgctgggattacaggcgtgagccaccgcgcctggccaaaaattagtaatttttcatgcatttccctcatctcacggtccgtagacacaagtcacagcagttggctcctctcatgaaacttcctgagcaccgcaggggcaaggcactgagtgtggctcaccaagaaacctccatccccacctgggctgccacatggcggaaagtcaataaatgagtcgcctggtttaccggaatcctcactagcttcagaatcctgaagacccatagcagacattcattttcctgaggcataatctgaaccaccagggctaaaacctggtatgtggacacaaggccctccagctagtgagtgggcctagccagccacccagcacagcatctcacggcagctctaccacggtctgtagatacggttacccagcaatcccacagagcaattcaaacgtttctctgtgggaaacagcccgagtaagaaaatattttatgcaagagaattcctgccactgactggggcatccacaaaggtctcagtgtgaatcgagccttgacagtatcaaggccccaggccatgtggggacgcggagccgtcctactcacagtgtctgcagaagccccactcgtggtctctgtcgtagtccgcagttgtgctacaccacagcttcgccctgctctctatgatgcactcctcgtagctcttcccattgaatatgaaggggaagacacaggggacgccgtcatcggtttctggaaagaagaagaacattatcagtgtggcagctgtgcctcgccaggcacaatcacctcagaatgcagcagcagtccctaaggaagctgcccatcctaaagcacctacgtgacaaccggcattcacctgccaaaactcaccaggcaactgagagaacacagcgtgattcacacaccagcattcacaccgggggtgtacagaggaacagctcacattcacgcccaaggttacagcactcataggaccgtggagctccactccgcagcttctttctgctgctatgtctaatttctagtttactatgagcttgaagtttatttacctcattgcaaatatttacctggagggcaacgatcaccattcacgtaacttaaaacgaccgcttcatcctggtgcctgtaatccagtttcattgattgcagccgtccaaaggatgcccccttggtgcctgagagcagacagactcctccgtccttacagcctccttgttctggcccgactgcaaaggtgcacaccccaacgctgtaggtgcgcgagtcgcgagtcacctggacaaaaaccatgcgtggccgtcagcagagtggcagcacccaggtctcaaagtgaagagagaaccactattgcagctgatgctggaggcaggttcatgaggaagagcaaagactcctctgtgtgcatcagagccacgcaatcgccttggccctaggctttccctggggggcctcccccaacccctaggcccagcttgcttgctcctcctgctccctgctgggggcctcggccacccctgccagccagccactgctctggctgtcgtctccagtcagagcccagtgagaagggacccagcagtggggtcaccccacctccctcacctgtgtaataagacattgtgcgggccaagtgagtgaatgagcagagccgacgctgcacgctgaagcatggacctgactctcctggcccacccagcgcccagaaggctcacacctactgcacacctgtcgggaggacctgtacccaggcagagggctccatcacaggagccagggtgttgacacctgggcccaaaactccaggctcatcactcaccagccgccgtgccacagcaggtgctggggttccgtaccccagtccaggcactggcatggtaacatctagatatctaggcttagggagtcaggggcccccaggcaccagtgaccacgacaccacatcagtaagaccagcagcccaaagaatcagcacacgccagggctctggcatggcatggaggcacatgcccaagtgcctctcaattccagggcacctcctacctccctcttcccaaagctgccacaatcagcaaacaactgccttgatcatcttcaaccaggttggaggaattaaatccctgtagatttcagccacccaggagctggccctgtccccatggataccttacattcatgtctccgggctgccccacctgccctctgtctgatacaaagggtcccactacccgcctcatgaggttacttatcatcaaaaagcgttaagtgcagagccatgaggtacaacgcaagtgtcagctgcgctgagttggccacgcaatccaagaaccttcctgagacctggcatgccctacgagagcaccaagatgctgcccagtggccacatacaccctctcagctcacaggtaccacattatccaaaacactcccagcagcctcacagcacctggcacctggtacacctgcaccagcaacgcccagggtgaacgcattaccttaaaggtgctcgtggaaaggctggacaagttgaagctgtagaggagctgctcatctgtcagggtacagccatccatcctcacttcatcaggacagacgacaggagtctcccattcgaacacaaagtcgcactcgctggtccttaacagcttaggcgttccctgttgccaggaagagcacgggtcttaaaaaccccatggcatagggatagatagcagtgacacaccacgtccctacaggggctgtgcataacccacagcggcctctcagagggaagggatgctagacaacagcagctgaaagacccaatgccatcttcaaggcacagacatcaccctgcccttgccccctacacatcctgtgagctccctggctgaatccaggtcttgtcttctacttagagagaaagcctcaatgttctgtgctacgggttcaaaggaagaaagggggagggcttatatgtcatgagagaggtctgtgaaactgagaccctgcctcacaagtgctccaatctactgtctctagacacgggagacatttattcaaggggcaagatgccacatggccagatattccataggccaagtattgtagaatcactttatttattccctccctcattcaacagcaacaaaaaaagatgaggcagctctcaggaattccatttgtaattaatgttaagcatctttttccctatgattcagtggtaaaagtacttccattgaaaatgaaaactgctggggaagaaaaatcttctaaaaatctttctggaacgctagaacacacattcagcataagatgcttcatttctaaaatcaagtaaacactaatcaccctcaatgtgcagctgctgagaattaactaaaatcacattagctaattcgatttgtcacgttggcagcagagtcaaagcaaggcatagttccacactctttagctggtggtgtagataacaaagcatcactcatgatgaggtgggtcttagaagtgaagactgtcctttaaagaacgaagaacttaatgcagaagccccccgcaaggcaaaatccacgttgccccatgctgtgtgcatctacagaggcacacccagacacccctataaaaatatgccaatacgcttataaacagatgcaatgggtggactgaatacagctctgcctttccttactaactaggactgtcactacactctaagattcatgaacacatccaagggctttgaggtgctctgggcccctgtggagtagccccaaacagcaggactgtttcctcctccttctcaaatactgtctctctcactggtcaggcggctgccaggtcactttctgtcactgtcagcacacccatgtctaacagtccctttacaaacctgctccaggcccaaacatcagaaggatgtctttatcagaattacaagacacccaacagatcctaatccatcacctgaactcctaggggtcagatgagccttggaatccaacatctttattaggattttaagaggcaattctcacacccccagatcctgtgatcaaacatattaatatttctgcagctagatgtatcaatatccacattaggtgggacaaatccacaccataaatagcctcagtccattcatgtcaaaggagccccaagttttcagagcttcagagatttcagaagcacagacgacaggctgtggtgctgtgtccctggagcaaagagctgttcccctgtgcagtagctgggacctggctctgcccctgcagagctactctgagtccctgtggaataggggccataatctaccaatttatctcacagagcagggatcaaaagaaaacgtcctcaaagactataaccaataccgaactcattataatggaagctggtattctttttttaatgcacataaaatggaagtcaatacctcattataagtaaaaggtgccactttgttgtagctattctgattccaggggtcttttgttacttgttaacttctgggctatgtcctgagtgactatagctgcccaaatgtctttctgacttcccagttagaataaaatcagtaattgttaaagtaaaaacaaaagttatgacacttttatgcatcagcagtcaaagctgaatgtcatttctatacttgtgttctatgtttttaaattacagcaagtttctatatgctgttaactgcgggggagctcactcagccctcaatcagtggtttaaattattcagacacactactagcgtaccatcttacccaaggcagacattttgaataagagtatccttggacctgacacgcactttctggttgtctagccttggctcactaacccgcagttgagcatctagatcgtcacaggcccacacttaccatgctcacacctctcttacagtgaaacgcgatgagcgaggtgtagttgaaatgcttgtccgctaagcaaggagtactgctttcaaaattcaagtaaatctcatttgctattggattgagtattggtggtcctgctacccggccgatatcctaaacaaagagcgagggcaaacagtatttcaggaaattaaccattcccaaggttagtggaattaagaattgatacagaattgcaaaaaccagacctcataggttctgagaatgagcagcatctaaagaaactgggtttataccaactccagttggaaggcttgacagatgctgtgtaacctccgtatgtcagtggttatcgttttgatcctaacgttagttctaaggttggttctatttctaggtatcttcaattttcaaagatcctaagcaataggaatctctccagtcacatcaaggagactacagagtcctcccatcagctgatgagggaagcccggaacctgaaaaacctctaaggatgctacacggtcctcccaccacctgacaggggaaggccggaacctccatgctgacctgccaccctcactgcccagtgctgccccgggactgcccactgacgtggcccagcagtaaccactggctatgtccttgggagaggggacaggaggtgttcactgttcattttcattgcttagcacagcacctggcacacagcggctgcccaagagatatttttgagtgaataaacaaataaataaaagaccagtctgagtattatgagaaaaaaaacaaaaaactctttttttatttttaaaaagtaaataaaggtgaatggccaggaactgtgtatgtgatgaatgtgtgtgtgcatgcacgtgtgtgtgcatgtgggtgtgagtgtgtgtataagcagcttccccatgattttgttctcagctacagtgctcttcattcaccactgtggggcacgttcagaccacgtggcaccacaccttctccagttaaataactttctacatcttttaacatttgacaatgggtggccaggcaatgattcccgatcgaggatccccggtctgcgctgtcagaaaggacgctaccaaagagcttcctggggagactcagcttgtccaggcctccatctcacacagagctggagctgtgctaattcaggctgtggccgatctccttacacactcctgacatctccccatatcactgccacatataatggccatctttctaaaggacatctagatatgttacaagaggatccatctttaaagcataatagatgatacagacagaaatacagacgacttgtgagatacattcaaatattaaaacataccaaggatttgacaaaatatgaatataactcatggagacaatttttaaagatccaaatttctattaaaacatgctagtaagccaggcactgtggctcatgcctgtaatcccagaacttcaggaggatcacttaaggccaggagcctgaggccagcctggctgggtgacatagcaatactcccatctctacaaaataattttttaatgcataaaaccaaagcttttaaggcaaaatatttagctattagcaaacgtactcttgcccttaattataactccttgccaaagaaactgtttgcatttcgcaagcgttttaactacagaagacaaggcatttcacacaaagaaaccaggctagggcaatgtgctttcctgtcacttcacctaaaaacttcttgatttgggtcaaccctgaggctcatgacaagtagagtccctacacacatattcgtgttacctcccatgctcaaagactggctggctaccatcatcagcgaacagttcaatgtgcaaacctttaatcttccagtagcggacccagaacatacacagtcccacttactttctccattttttttatgcttgagcaactccccactgaaggcaagaaacaacgcaaaggttatcactaaaagtcttgcaaaaattatctccacccttggatttgtcatacttactatggggggaccatcaataggaactttgcacacagcggctccggcaggacagggcactccgtgcatgggatttagtggctgacaaatattgatgtagaaatcagggttggtatcggaggcatcatcctcactctcatcataagcctcataaccaccagtgcgatgaataaggggagacaagtcaacaatagagcttccattcctcacggaacattcggtctgttaagtaggaaagactgctttgagtctacaaaaaaattttcctaatcaccactaggtcatccataagaatttaaaagctgaataacaacaacaaaaaaagtagaaaggtgtcaaaatgcttcattacatagcactgggcacttccagtcaactttattattggggtgatcaggagtggacagttcagctgggcatctactagtgggcaagtgaacctgacgaaggggcccgggtgcagccaggcactggacatgcacttctcccgtgcccatctgaaaactcaccgcttgctcgcaggccagcggcgtgtgccaggagaagaagagagtgcatgtctgcttgtccagggagatgagcatgggcctattggttggcctggcctcaggcctgcacacgaaactgatcacactcttatagctcaggccggatttggagggacaaggggacccatccttgtacaccagctgcaggacctggtccacgtatctcagcctcttgttggccttgcccacgctaatcctggtctgtccaaagcaggcccctgcaccacaagggaaaggcggagaaaacacaatcacagactcgatggccaattttctgatgagaactttcgcaagtcaggaccatcaatttcatagccaacacttataacttcaagtgtccaatccggctttaaccattgttttacattgaatgttcattccatcacatgaccatgtgtcccccacatggggtgactgctgcaggagacaaaagcgtctcagcttcctggctctgctcatcctttttgccattagcatgcaaagagactgaggacaaccccagaggacgggagagtcagacaacacacgagagaccacagcactcacccacgccaggagggcagttttcattctccccacagatgctcatgtaaaccaaccccttctcgctgtaagcagctgtgaatcccgccctgccacttaaggagctcagatcaaacaggtgtcctgtagggtggaagaagatggggacacagtgactccagggagctgagacttgggaggctcatcatcggcgagctcacacacagattatgtcagcatcgggacttctgacttctcaccacgacccctgtcctaaatcctccaccaacagccaggctgtatcatgagactgtcagtcccttgatccatgagatgtcccatccttagctgaaaagatcgtggctcacagcaccctctgctgggccataccacagcagccactaagagtctggtgggcatggggagagcctgcccagcacacctcttgctgccaatggactgtgcctgtgcctttctgggtgcccagcacaagggcaggtgagagactcctggcaatccactacactgatgctgaaaggcagccaggggctagctctaacctgccctggagagcctagagctgctggactgacactgtcagtaaccccagtcaggagcacctctcacaccaggagagtgacaggagggatggattctctgtgggagcattctctcctccactgaaggagagccaggagaacacacagcagcccatccagagaaaggccaaacacacccacacaccatgacacctctgcccagggcgcctgctgcccatagcttctctttgggtctctcccctgatgagctgggtttggtgggggcaccgtctctcacctgcgctggggttaacgactggcaccacctctcacctgtgcttgggttggtgacctggcagtcatcatgctcgttgctcttcatgggacaggctgtggctgtgggccaggcaaaggtgtactcacagtcctccacggcgctgatgaacatgggcctggagttctacaacaaagcacagacaggtcctgaagggatcacgcaaaaactccatgtctatcatgatttcaacttacaagtggaagcttctctgaaaaactccacagcatgtgacatttctgtctccatgtgcctgtgggatgaggcgcagattaggaaaagcaaagggtcagaatgtgtcctgagctgccaccatgggcttcccctgcaggtaagtgaaacacccacaggcagcaacacacttaggggaccaggaagctccctcaggctgaggaacaggacaggggttggggacaggcgtgcaaaggatgctggaagggctacagggagacacaaatgtgtaaatcattgataaaattctaaaaaccaaatgaggtaaaatccattatcacagtcaaaacaaaaagatataccaagagaactagcccattccacgcatcctcccactggcaccagccaaggcttactctgctcatctcaaaacgcttcatgtccactgcagagttagcatgatgagttcagcagcaccttccttcccaggtaaaccccatgattcctgctgggcaccctgataagccacgctgcagtccagcctcccaggccctgggcacaggggcctcgacacacccccacccttccctcccagcctcctgggccctgggcacaggggcctcgacacacccccacccttccctcccagcctcctgggtctggggcacagggcctccacacacccttcacctttccctcccagcctcctgggtctggggcacagaggcccccacacaccaccctcatccttccctcccagcctcctgggctctggacatggggaaccccacacaccccttcacccttccctcccagccttctgggccctgggcacaggggccccacacaccctctcacctttgccccccacatgtggggcagcccttttgtcctcggccatgagcctctcaggtcacagaggagaatgctcagaggccccagcagctcatgagtctggactaagcctctgcacaatcttcccaagaggaaacttccctgccgctccaggcaagagggcaggcctgaagctcctggagccccccatcccaagctcccctaccactgctgcccaccgctggagagcatggggcgagccaccctgacacccagcgagctggtcttgcccgagttaatgcccaactcagccaccgagcttgtcatgcacgctagcactggggctcaccacaatctcacacacagaaaaacctgtatgcagtcgacacctgcttacgtgcatgccaaacaagtaagggaagaactgatcacaggcactcatgctcactgactgtgcatctcccgtgtgtcagaaatgacacctggcacttcctacctcttctctcgaaaccctgcaatgggcaggacaagtatgcctcatgttatgaacggctgagcagggcagactacctgagtaattaaccaagttatgtggctgggaagtggcagcgctacctgtgacccgggcccagccaaccttctcgtgcttcccaagctgccgccgtgaagacaaaagggcatgtagtcaaacaacaatctcctccacagcctttaggggtctgagtcaaactctgaagagaaccaattctgagtcgggaactgccaggcaagcttctaaggagccagacagcacgagggttccccagattgcaggccgcggcgacgctgttcccccaacctctggtaagggcgcatcatcccaggctctagaactcgcatcccaaggcagatgaggacgtgcggctcaccgccctgcacatgggctcaattcccaaagctgcaacagcagaaggtgcaggaacagtcccttaccacttggctctcgctgcaggtgaatcggatggtggttgactttttccgaatcccatctggacataagtcgccatcaacgtatttcaggacaattatgccatctctccactgaggtccgtcccttaccctgccgaggttcacgggcttggagccacccagcagacacgcggctgcttctggagggcacggctctgcagcaccagacacaagaaagagttgcctttagtgactccccaggctagaacagaacttcatcaggcaataaatgtcacacacgctgcagaacttcatacgctttctaagagtcacttcaaaatacctgctatttctttcacataagtcagatgacaatgacatcacgttagttctcactcacttacatgctgttttgtcacagatggactggggcaggcgggcgtgagtgtagaggaatagctaggctgtagcagtcgaaattctttctgaaccccatataggatgaaggttatattcccaaattaagacagaggaacattttaaatggcctacgtccatgcaccttctttattcaagaagctaccaagaattctgcctgtttcccagtccctaaaatgcctgtgccatgtgccctgggtgaagaactagtcccatgccacaggggtacagccactgtcgaagtctgcacagcacaacgcagcaaggggaagtggaaccacagcctcaaaccacacagaggatggaaccaccttctgcagctaaaaataaccacaccgcctttgaggtgagccacccaagatgcaggtggggctgtatgaaactccacgaacatgggatgagtttcatcttcagggttccgaggggccatgagtggtaccaagatccctggaggtgcccttggtttcccatgtacagctgacatccagtctcagccaaccaccgcaggtttgagtgagctgtccctgcatcacaaaaggaccgaccatacaactctcaacatacgcaggcacacaccaagacctccacgtcacaccccccatcttctacctgctaagaaggattcctcaccatggctattatttctatctattatatcttcatctcctcatgttcagaaagggttatcatgttcccagcagtcctcagcactgatttaccctgggccatactagggatcaactgttaacacccttaaatcattcttcgtcctgctgtttctcggccgaaccacgtccatgctgcagagagtaaagcgcctccaaagaatccccatcctacttgatcttccctgataaactcatgacaagccaccaccccatgaagaggccctctctcaccagtgccagccttcaatacactcactgcaaacaccatcccacgaggaggccctctctcaccagtgccagctttcaatacattcattgcaaccaccaccccatgaggaggtcctctctcaccagtgccagccttcgatacactcactacaaccaccaccccacgaggaggacctctctcaccagtgctggcctgtgatacactcacagcaaacaccaccccacgaggaggccctctctcaccagtgccagcctgtgatacactcactacaaccaccaccccacgaggaggccccctctcaccagtgctggcctgtgatacactcactgcaaacaccaccccacgaggaggccctctctcaccagtgccagcctgcggggccagagacttgcagacattgatgaggtagtgctccgggtcccccgtcccagtgatggcttcccagttgtcactgtaccttgacagggacgagaggtcgaaggagttgccagccccatctctgaaaagaagaaaacccgcagttagttaggcttggtcgtattctctttaaacattgggcactctgtctagaaacgttcaagtattcaggcatagtctaagcctgacagaactttagactcgacttctctctgtctctgtcacacacacacacacacacacacacacacacacacacacacaccccccatcagaatcagcaacaacataacttccctgaacataatagttcaggaaactattaggctcacttaaaaaaaaatttaaattttaacagaaaaactcaagtctgcaaagtgcgtgccgtctgtgctcaggccactgagaagtggaacttgctggtgacaaaggtaagcagccaagatgctaggagcacacacagcaggggccatgcccggggcagccgcacgccacctgttgtttaaaaccaaggccgccagcagttactgaaattctgaaattaaaatgggcttgctgacctttctgcacaggctaaaggttcactaactacacaaatcccaaatacagacagtaactgggaaccaaccccatgccaggagcaatattaacagtgagtgagacacacactctgccaccacggagcaggaacgggagcagctacagatgccacctcagcggcagctcttagcgcttcagaggggaataaaaactggtcattcattcaaaagctgtgtgctaaactgggggtactgtattaaacaaaacagtattaaacatcatcaatcttacaaagtttaccaaaattacctgtggaagaaaatgaccgtgaacaagataagacttttaaaaatacatactgtatttgatggaagtaagagctgaaggaaaaaaggcagataagggggatatgaagttcggggggcagaggcagctgttgaaattttagacagtggagccagagaaggcgtgaccgagaaggggacctgtgaatagactctgagagaaatggaatcactgaccatcctggcacccagtaaagcgcatcccaggcagagaacagcatgagcaaagggcccgaggcacataagcccgacatgacccgagaaagacagaaaccccgtgtggctggaacagagtgaaagtgaggttattagagacaacacgggggtcatgtccatcagaggaagaacttcagcctgtaggtcccaatgagatgggcgctcactgcattgaaggtttcagcaagagcgacatggtgggacttatatctcaagaggatcattctaattactgtgtgggactaaccaaacgtgtgacaagggacatggcaaggagacctcggagtggcagctgcagtactgcacgcacgagaggaggagtgcccaaaccaggggcaggtggcaggaagggaaagctgcctgaaggtgatgggacaagaacagagcttagtgaatatcaccaaatgctctaaaagtagtcaacagaagaaacagaaatagaactaacaaagccaaggcagaggaaagaggagaggagaacagcacaggtgaggacagctttcatcttttaaaagagagtcaacagacaccattagaagctgacaaacagaggtttagagttatagaaggttccaaaaagaaccacaagaagaaacagtaaaaagtggagtgaagctaggggttggggagggagaggtgagggtgggtaatttcatctattaatatttttggactctcaattacaatagacatatattaacttttattatgagattataaaattctcctctgatttaattctacttttaaaaacttagcataaaaatatctttaggaaggccgggcgcagtggctcacacctataatcccagcactttgggaggccaaggcagacggaggatgacctgcagtcagcagttcaagaccagcctggccaacatggtgaaaccctgtctctactaaaaatacaaaaaataggctggctcagtggctcacacttgtaatcccagcactttgggaggccaaggcgggcgaatcacgaggtcaagagttcgagaccagcctggccaacatagtggaaccccatctctactaaaaatacaaaaaaattcgccaggtgtggtggcgggcgcctgtaatcccagctactcgggaggctgaggcaggagagtcacttgaacccgggaggcggaggttgcagtgagtcgagatcacgccactgcactccagcctgggcgacagtgcaagactctgtctcattaaaaaaaaaaaaaaaaacaccacaaaaattagccaggcatggtggtgtctgtaatcccagctactagggatgctgagacaggagaattgcttgaaccagggaggaggaggttgcagtgagacaagatcacgccactgcacttcagcctgggtgacagagcgagattccatctcaaaaaaaatacatatatatatatatatatatatatatatatacacacacacacacacacacacacacacacacatacacatatctctaggaaaaatgctttatgtgcaaagaaaatcaaaattttattccttgtatataaatatcagaaaactgaaggcagcctcacatggcagaaagagaactgctaagtgaactggggatatctactgaggacatttcccatccagtagaaatgagaaacaaatttgtttcacatgaaaatatttacaaaatgttaactggaaaaggtaaggttactaaaattatgatttaaagtcactgaacataaattactaaatgcttgcatttacatacgttcctaaaacttaaatgatgatttcacctacataaataaccgatgacacaacaggacaaaggccggaaggaaacagaatcacctgcactttcccccaggaaagtcaacagtgatcaagtggctcatactgggtgtttcacacggcagaacacagggcatccctccaaaaaacagaaccgcagacccacaaaaccaaaatctctaaggatgggaccccaggtgtccagagggcgatctggcaaagctgttgagagcagctctgtggacgatcacatgcaacgaagacctcccttcatcgcaggggtcaccacaccgctcctggcccactctgctcactgacatgtggatcacgcaagagtgccaggggtccactctctgcttcagctccaatcccttccccatgcagtcaccacagcagctccaggtggtgacggagctgagagttaacctagcccgactcctcattttaatatgagcaaaccgagtcctaggtaaattaactgactaatctaatcccctgcacccaagaccactaattattaaagcaaaatcataccaagttagtctgtccaaaagagacaacacatccatggacttacttgaatgaacattcagtcagatcgaaaggtgggcaggcatactgcgttcgccactcaaacaagtaggaacaatctgaagtctcctttagaaatactggctaaaaaagttaagaggcacatatataaaagtgagaatgcaaaactttagtttatactttgagttttaagaatgaaaatagtaaagaatggttacgttcatgaaaatcaatactaactgatgaaagtttcaacatattttctgtaaatggttattttaaactcagttaaccaggagatttgatgagatctgaggacagattctttctaatatgatcccagcagcctgagggtggggagaagaccccgctgagggccgtcggtacatgctcacccgctgggtgccgcggtcacagtagaagaagatggctgtggagcgctgataaaccttatggcaagtgtccccccccgtgaagttcatttttaacaagccattttcataagttagcttctgagtcaggagacctgtaaagaaggagaacattaaacaaggtttggttcgggtccctaggctgtcaaacttagcctaagacatgtgacaccacacaccctgaagagtgtgagacaaagtatccctggcctcccagcaccataccatgcactcctgtcacattacactttgggaataaaatcaggcttccccttgtccaaggctgctgcaacgtcacagactgacccgtgtatgatgacatgaggcattccttagcctcatcacctaagggaatgtcactttctccactgtgcctgagggctgtccacgtactcaccaccagctactttgacttcatttttacaagttcctaaatgtatttaaatcttgcccaactgctgaaacagcatgaatgaccaacagcgtgccctgtaatttctacagccaaacctcgtactaaatgcattccctgtgactcaatgctatcaagtactaccccagaacatccaacactggctagctcactgtgtcccaacgttgtaataaagaagagaaatatgaccttagagtcagtaactggcatggctaactaagaataaaatagacatgctctaccaacatccttcagtatgtactctgtttaagaaaatcaagcaaaatccgaaatatcattaatatgcttttttttttttttacagtagaacactcatgtttctgactcaagggaaaattcatcttcagcaaaatattttaatattttaattccattcctttgcaacaaaaggaaaacgacaaacaatggtacctgccactttgtgaaatccctgcggttcccgcttttcctgacatgaggagaccaccttggacttgtcacttgtggggcagacgtctgaggaaagcttcccacagacccggaagtaataagtgtattcgccagcgctcacgatggtgtcgttgaggcccaggggcttcaggtcatacaagttgccatgccttgggtctttcacctcacagttgtccccttcaagaacatggaagaagtgaagggcaactgcaaccacacacgcattcacattttcaagcaaaaagctttacaaatggccgggcgcagtggctcacgcctgtaatcccagcactttgggaggctgaggcgggtggattactaggtcaagagatctagaccatcctggccaacatggtgaaaccccgtctctactaaaaatacaaaaattagctgggcatggtggcaggcaccctgtagtcccagctactcaggaggctgaggcaggagaatcacttgaacccaagaggcagaggttgcagtgagccgagatggcgccattacactccagcctggcaacagagcaaaactcggtctcaaaaaaaaaaaaaaaaacttttacaatttttggttaggtaaataccagctataaatgggcattaaaagccatttccacatgattttgtttatatataatacaaatcgcctggcaaacagctttctaggaaagtctaggtccccgaataaagacttgcttcatcaaacaacacaaaaccaaaccccacattagtgtcttcaagcatcagacgccaaaatcccatcaatccaggcacacaaggaaaatgtcactcgtgaaattagcaatatgcttcagtaaaaaaaaaagctcaaggaaaagaaattatcctccccctagcgtgtgtctcatgaccccagctatggctgttatcacacggtctcatatctaaggcatcgttcagaacgtctgctactctatacatttaaaatgacttgtagggacaggcccagtcctaccttccactctgacaacgggacaggcttccacagttctccagataaacacgtactcacaaccatcctgaagctgaaatgctggtgagccctgtaatataaatcagcagcctgatttgtttcctgtttattttaaaaattaatcaaatggggccgggcacggtggctcacacctgtaatctcagcactttgggaggccgagacgggtggatcacaagttcaggagttcaagatcagcctggccaagatggtgaaaccccgtctctactaaaaatacaaaagttagctgggcgtggtggcaggtgcctgtaatcccagctactcgggaggctgaggcaggagaatcacttgaacctggggggcggaggttgcagtgagccaagattgcaccactgcactccagcctgggtgacagagtaagactccatctcaaaaaaaaaaaaaaaaaaaaaaattaaataaatgatagccacagttagtacccaatctttgacctccatgtgcaaactacgtaacatttattaaacatttaagacctgaagaaatgagtgcattctcgtcaaaccctagcaatggctgaaactccacgaaaacacaggcaagttttaaacaagatagaagattcagaggttcaagggaaatgggaaatggagtcacccggggacaacatctcattgctggtctgaacacacaccgatatctgagcacactcaaacgtgatcctggtggagaagcgctggttcccacacttgtcaccgttgacatacatgatgctcaaagatccattcgccgcggcttggggactcatctgcaccacacccagattccagctattgccttctgacactaagcaagaccccactgcgctgcctggaagaacagaataagtggtttgggcatgaggaaggcgatgaccttgagtcaaatgctctaataaaatgaacagacgccaatcaagagaccaaggagaactcaccctggcatccaggaatgtaagggagaggattgcaaacgctcaaatagaaagtcctctttctcccatcgacagaggtgtcaacagccgtccaaggtttcctgactgtgcttaggccagtcaggtcgtactcatttccagccaggtctgaaacacaacaaaaaaccacgctggagaactctgcctccttgtgagcactcaagaactgcctttcaccctaaataagccctgaggaggcgtgaacctggcattcctaactgtgaggataaggaaatccacgggaggctgagaggctttgcctacaaaacacacccactctgtccctcaaaactgcccttcacagccgggcctggtggcatgcgcctgtagtcagctactttggaggctgaggcaggaggatcacttaggaccaggagttcaaggccagcctgggcaacatagtgagtccctaaagactctttaaagaaaaaagccaaacccccactgcccttgacaaggaagtaccactgttgcagagcaggcagggtcaatcccagaggtcaaggtctcctgtatacactgtcagcttccagggcacagcttagggagtttaacatctttttctttttttttcaccctcaaataagaagctctgacagtacatgtgaaatgtgtttcctctgcattttcttctctgttcttaagatgtatctgatcccaaaagatagcttaaaaccattaactatatagtcagattctcttcaagaaaaacattacaactctaggcatcattcaaagagaatatataacagaaatgtcacgctgcctgcataaccaagcatacacaccacacacacacaaatatacatacacacagaaacacaccttcatatccactcacacacacactgactcttgaccggcctctcagttcttaggccgcacggccttaccggtgacttggcagtccactggagaaggaacacaggccaacgcggtttcaaactcaaagtaagtgtttcggatcccttgcccagagtcgatatcttgatgcaggaatttgaggggccctgagtaaacatcatcattgcaaacaaagcggacgataaaagcatcagcggtacctgtaaagcaagaaggcccagattttaagagacagaacagtattcatggcgcagcccacaagcacagtgcagcaacaggacaaggctgccactggcaacaagcttcacagccgttcgtgggagcaatgacaccagggcaccaagtgtgtatcgagggactcgacatgaacaaagtggtcacactcgctacaacagtggcctatgacaggtttacacactcactgcaacagtggcctgtgttacaacaggtttacacactgcaacggtggcctgtgttatgacaggtttacacactcgctccaatggtggcctatgtgatgacaggtttacacactcactgcaacggtggcctgtgttatgacaggtttacacactcgctccaatggtggcctatgtgatgacaggtttacacactcactgcaacggtggcctgtgttatgacaggtttacacactcactgcaatggtggcctatgtgatgacagctttacacactgcaacagcggcctatgttatgacaggtttctaccataagcctaacatcctggcattcctactcttccagaaaatatttaaatcccacgagtttaccaatccaagcattagaagacaatgtaactctaattcgttggcttattgaacaaatactaagttcctaccatgtatcggaatgaatgaagcagacgaaaacccctgcctgcagctgtgctggttgcagagcgaggagcaagtacaaagattcaagaggggagggtgggagacagtgcactttgtttatatcagaaacagggaggccagcgggccaagcgggaagagcagcagggggtgatcatctcagagagcccccacgggcgtcccatggccgtactgtggacactggcttctactctaggtacagtgcagagcctccgagggctctgagctgggaagtgatatgatgtgatgtttcagaaacatcactctgactgctgtgttgaatacaggctacagcagccccccttatctgcggggggatatgttccgagacccacagtgaatgcctgaaattgagaaccctatatatactatgctgtttcctatacacacatacagaggatgaagctcaatttgtaagctaggcacagcaagagatcaacaataaaacagaacaactgtaacaatatctgtaatgacagttacgtgaatgtggtttctctcattctttctcacaaaataccttattattttcggaccatgtgataccacaaaagtgaagccacggataacgggacccctgtattctgcgaggtcaaacgcaggaagaccaccgtgatggctcctgcagcaaggtggacagcacagcccatggtggcgggggatgtgcacatcctacactcaggaaggtgcatggccagccacagagccaccagggccctttttagctacaaaacaacatggctctgagctcacctttggcagagagaggccctttgtaggtcagagtgatgaagccctctgtggacagctggaggcttttctcaattccgactggccttgctggcttccaattcttgagctcttcag

SEQ ID NO: 1326 - DNA, 308 bp, Homo sapiens
aaaattcttttttttttgagacagagtctcgctctgtcgcccaggctggagtgcagtggcgcgatctcggctcactgcaagctccgcctcccgggttcacgccattcccctgcctcagcctcccgagtagctgggactacaggcgcccgctaccacgcccggctaattttttgtatttttagtagagacggggtttcaccgtgttagccaggatggtctcgatctcctgacctcgtgatccgcccgcctcggcctcccaaagtgctgggattacaggcgtgagccaccgcgcccggcctaaaattctt

SEQ ID NO: 1327 - DNA, 323 bp, Homo sapiens
gctttctttctttttttttttttttttggagacagagtctctctctgttgcccaggctggagtgcagtggcgcgatctcagctcactgcaagctccacctcccgggttcacgccccacgccattctcctgcctcagcctcccaagtggctgggactacaggcgcctgccaccacgcccggctaattttttttgtattttttagtagagacggggtttcaccgtgttagccaggatggtctcgatctcctgacctcgtgatccacccacctcggcctcccaaagtgctgggattacaggcgtgagccaccgcgcccggcctaaa

SEQ ID NO: 1328 - DNA, 4062 bp, Homo sapiens
atttttactttttttcctttttctattcttttttttttttttttttttttttttttttttttttttttgagacggagtctcgctctgtctcccaggctggagtgcagtggcgcgatctctgctcgctgcaagctccgcctcccgggttcacgccattctcctgcctcagcctcccgagtagctgggactaccggcacccgccaccacgcccagctaatttttttttaatttttagtagaaacagggtttctccgtgttagccaggatggtctcgatctcttgacctcgtgatccgcccacctcggcctcccaaagtgctaggattacaggcgtgagccaccgtgcccggcctattctttttttttttttttttttttttttttagtagcacttgttgttgaagcatttttactttttgtatttccttctttctgagttactgtggtaggctgcatctaaaatgactcctaagcaccgtaccttctggttttcacatccttgtgtaatttcctcctcttgtgcttgggccggacctaatgacctctttcaaaagaatagaatatggcaaagtgacagaatgtcacatctgagattaggttacaaaagactgtgactttcatcttcctctctctcttgcgctctcacttgctcattccaatgtaggaaattgccatgttgcaatttccaaaggataggtcacaatccaaaggataggtccatatggcagaaaaacggagggtagcctctagtcaacagccagtgaggaacggaggccctgagtgcaacaccctgatagggactaagtcctaccaacatcaacacctagtcaagccttaagatgactgcagcacccgctcaacaccttttatacagccttatgagaaacccagagccaagagacccaactaagctttgcctagcttccttactcatagactctgtaagaaaataattgtttattgctttaaggcaccaagtttgggggtaatttttcatacagcaagagataactaatatagattctgtttgataaatattaacttacacctaactcagatttcactcaaagaaattaatatgcatgtgagaagatatattctttacccagccacgggaggtattgcctaggaaaaacttagatagttgccaaccgattgtatcataatctcacttctgagtttagaaattaatattaaaggactgtagtttccagtcagacttttccatttaaaaaccatgagcttctatttttacaagtcataggtacttaattagttctccactattctgtaaaataatacactcctagttctgtgataactctggtcaattctagaaataagtattcgttagtacaaattaccagagcctgtggatttgaatgtatcaatctgttttattaagcaggccccattttgtgaaactcagctggaaaacgacagtcaacctgacaattctcatagatagttaatttaagaaattcttcttcttcttcttctttttttttttttttttttttgatagagggtcttactctattgcccaggctggagtgcagcggcacaatcatgtctcactgcagcctcagcctccggaatagctgggactgcaggtgcacaccacgatgcccagctaatttttttttttttttttttttttgagacggagtgtcgctctgtcgcccagagtggagtacagtggctccatctcggttcactgcaagctccacccgctgggctcacgccattctcctgcctcagcctcccgagtagctgggaatacaggcgcctgccactacgcccagctaatttttgtatatttagtagagacggggtttcaccgtgttagccaggatggtctcgatctcctgacctcgtgatccacctgcctcggcctcccaaagtgctgggattacagatgtgagccacggcgcccggccgcccagctaatttttaaattttttttgtagaaacagagtttcacgaagttgcccaggctggtctcaaactcctgggctcgagcagtttgcccaccccagcctcccaaagtgctaggattacaggtgtgagccaccacacttggctaattttctttttctttttctttcttttttttttttttttttgagacagtctcactctgtcacctggctggagtttagtgacacgatcttagctccctgcaacctctgcctcctgagttcaagtgattctcctacctcagcctcctgagtagctggaattacaggtacacaccaccacgcccagctaatttttgtatttttagcagagacagcgtttcgccatgttggcctctatctcttgaccttgtgatccacccaccgcagcctcccaaagagctgggattacaggcgtgagccaccatgcccagcctaattttttattttttgtgaagatggggtctctgttgcctgggctggtctcaaactccagggctcaagtgatcctccagtctcagcctcccaaagtgctgagattacaggcatgagcccctgtgcccacccaaaaaattattcttaagctggtgagtacataaatgtttctttattattttttaaatctatatatatgttttatgaagtttttgttatgtgtaatacatttcataataaaaacaaggtttaaaaaaaacaagctttctgacttgttctgatatttaagattttggtaaaaagttttaagttttaaagagtgcatatgggctggtccgagtgcagtggtttatgactaattaatcacaaccagttccagatttctttgttctttctctactcccactgcttcacttggctagcctttagtaaataaataaataaatagagtgcctatggtagttaaccaaaaaaagagtgttttctaagcttccattaagtctatcatacactatcattaattcccctaagactgtgtcaagttacctatttacaaagatcgattgctcagatccttcaaagttcatgaatcctttagttttggatgataaagagtgaaaaaacaaaagttaaagagaagcccacagaaccagagaaaaaaagaagttgccttctttctcatccttcataaacacctgcccacacaggttgatgtcctttttcaaatatttagtcagaccccaagcactacctttgaccctggtattacaagtcccactctgcctttactactcatatctgaacttttaatatctaattacaatattcagtgaactgatattacatgctaccatttttaagtttggaattaaacttggaattatgttgacaaatctggtttgttttagaacttaatacgatttagaacttttgtttattatgttttataaattaaatgccattttttaccttttaaaattatcttcctattttattcattcagcaaatatttatatacctatagtaaaagtatataaacctgatatatagtaatatatccagaaatgttcaggatagaaatgcagtagtgaacagacaagcaagcttgtagtctttaaataaattaccaactgtaatgctgtttgacattatgtttttaaataatgcataacctattgttatcagggagttatacatacctatgtattaccatatatcttccaatataggcttgtaataaagtcagtatactcacgttctcttttctaagcatgtcttaacaggttaaaccacacaaccgtgatatttgtatattatataattaacatcttaaataacagctttgaaatttctttttttttttttttttttttttttttttttttgagacggagtctcgctgtcacccaggctggagtgcagtggcgcgatctgggctcactgcaagctccacctcccgggttcacgccattctcctgcctcagcctccccagtagctgggactacaggcgcccgccaccacgcccagctaattttttgtatttttagtagaggtggggtttcaccgtgttagccaggatggtctcgatctcctgacctcgtgatccgcccgcctcggcctcccaaagtgctgggattacaggcgtgagccaccgcgcccggcctgaaat

SEQ ID NO: 1329 - DNA, 310 bp, Homo sapiens
ttttttttttttttgagacagagtttcactctgtagcccaggctggagtgcagtggcacaatctcggctcactgcaagctccgcctcccgagttcacgcctttctcctgcctcagcctcccaagtagctgggactacaggtgcctgccaccacgcccagctaattttttttttttttgtatttttagtagagacggggtttcaccgtgttagccaggatggtctcgatctcctgaccttgtgatccacccccctcggcctccaaaagtgctgggattacaggcatgagccaccgcgcctggctgagaatc

SEQ ID NO: 1330 - DNA, 255 bp, Homo sapiens
tgcagtggcgtgatctaggctcactgcaagctccacctcccgggttcacgtcattctcctgattcagcctcccaggtagctgggactacaggtgcccgccaccacacccagctaatttttttgtatttttagtagagagggggtttcaccgtgttagccaggatggtctcgatctcctgacctcgtgatccgcccgcctcggcctcccaaagtgctgggattacaggagtgagccaccgcgcctggccagaaatc

SEQ ID NO: 1331 - DNA, 4635 bp, Homo sapiens
taatttttttttttttttttttgagacagagtctcgctctgtcgcccaggctggaatgcactggcgcgatctcggctcactgcaagctccgcctcccgggttcactccattctcctgcctcagcctcccgagtagctgggactacaggcgcccgctaccacacccagctagtttttttgtatttttagtagagacagggtttcaccatattggccaggctggtctcaaactcctgacctcgtgatccgcccgcctcggcctcctaaagtgctgggattacaggcatgagccaccatgtccagctgagactgcatttctaaaggctccaggtgaggttgctgctgtgatgctgagggtcccaggactgcatatctgctgcagggccttgccccttccaactcctgctgccttcttgacattccctcccctttcactgagcttgtgcacagactgtcttctcccctctgggctacgcacccagtttttcctgtctggaatgagctgctattcccccttaccctacacaccccatctcctctttccccaacagcaccctgtgctgaagccttcgcaggatttaccaggctgacctgttagtacctgcatggatgtcttcagagcagagactgtggattgtctatcaccaagttccagcacctggtacaggatctggcaaatcacaagccctcaggaaatatctggggaatgaaaaatgaacctctgagaggagataagatagaaagacgcataatcatcatgacatcatcatagcaaataccacttggcacttactctgtgctggccctgttgttggtgcttgacatttagttaagtcatttaattcccacaacaacccagttttgtagggattatcatcaaccttattttattttaattaattatttgagatggagtctctcactctgttgcccaggctagagtgcagtggcatgatctcggctcattgcaacctctgcctcctgaggtcaggagttcaagatcagcctggccaacagggcaaaaccccgtctttactaaaaatacaaaagttagccaggtgtggtggcacgtgcttgtaatcccagctactaggtaggagaatcccagctgaggtagaagaatcgcttgaacccaggaggcagaggttgcagtgagccgagatcacgccattggactccagcctgggtgacaagagcgaaactcgtctcaaaaagcaaacaaatgaacaaacagaagaacaactccgtaagtttgtgccaagctgatgcttacagctgggcttcaggaccattaactgaggatgcagaagatacaggtggcagttggaagagacagtgggggagggccttgttgagaagctaaggtcatggtgtggaggggaggaaaggagggcaagtatcagagtgggacaagagtgctggggaggacaggatggctgggtaagatggtggcgaggagtgatgggtcctgggagccagggaagagggaggagaaggactgcgcatgagtgtggttgacagagagaggctggaaacctgaatggagcaggaagtcaggcatgcagacaggtttggcaagaaccaggatggtgggagcggggctagacactgtgtgctggatttaaggagaaggcagttaaacaatagggaaacacgccaaaaatcttgaacttgagagtagaactacaggtaacaaaggtgttttgttattctttttaatgttttctaacttttaaaatgagcatgtattcttttgtatctatatttgaatttatagcataatttttcacattaaaaatggatttactttaataggcaatacagccgggcgtggtggctttacgcctgtaatccccagcattttggagggccgaggtggaaggatggcttaagcccaggagttgaagaccagcctgggcaaaaaagtgagacctcctcccatctctacaataaaatacaaaaattggccaggtgctactctgggcacactgcctatagggtagccctgctctgcaaggccagtactaggagggaaaaagaaaaagaaaacaaaggaacaaacaaaacaaggaaaaaaagaaaaaaaaattagtggggcatggtggtgagtccctgtagtctcagctactcgagatgctgaggtgggagattgcttgagtccaggaggttgaggctgcagtaagagtgagccatgatcaggccactgcagctccagcctgggtgacacagagctcactgcagccttcacctcctgggctcaagtgatccttctacctcagcctcctgagtagctggaactacagccgtgcaccactccgcctgggtaatttttgtatttttttgtagagacaggatttcgccatgtttcctgggctggtctcctggactcaagtgattcctccacccctggcctcccaaaatgctggtattacaggcatgagccaccacaccctgcccttttatcttttccttcttcttccttttttttgtttttgagacagagtctcgctctgtagcccaggctggagtgtagtggcgagatcttggctcactgcaacctctgcctcccgggttcaagcgattctcctgcctcagcctcccgagtagctgggattacaggtgcccgctaccaccccggctaattttttgtattctagtagagatggggtttcaccgtattgctcagactggtcttgaactcctgagctcagtcaatccgcccacctcggcctcccaaagtgctggtattacaggcgtgagccaccacggctggccccatttttcttaatgtagatgttcttggtaacttctgggtacatattctttgttagatatatgtattgtaaatattttctaccagtctatgatttgatttttcactcttttaaatgtgtcttttgatgaacagaagttactaataataatgaggttcaatttaataatcatccatctcttatggcttatactttttttgtgtgtcttaagaaattttggtctacttcaaggtcatgaagatattctcctatgcttttttttttttttttttttgagacggaattttgctcttgttgcccaggctggagtgcaatgttgcgatctcggctcactacaacctctgcctccccggtttaagcgattctcctgcctcagcctcctgagtagctgggattacaggcgcatgccaccatgcctggctaatttttgtattttggtagagacagggtttcatcatattggtcaggctggtcttgaatccctgacctcaggtgatccgcccacctcggtctctcaaagtgctgggattacaggcgtgagccaccacgcccggttgatattctcctatgctttcttttagatgttttattgtttttacatttaggtctctgatccatcctaaactatgttcattaatggtgtggtcgggtcacgattcatgtttccctatgtgggtatgtaattgacctactaccatttattcaaaagaccattctaccctgacttgtttgcagtgacactattataataagtcaggtgaccatgtacatgtagatctctcgatttcattttattttattattattttttttgagacggagtctcactctgtcacccaggctggagtgcaatgggatgatcttggctcactgtaacccccgcctcctgggttgaagtgattctcctgcctcagcctcctgagtagctgggattactggtgtgtgtcaccacgcctggctaatttttgtacttttagtagagacagggtttcaccatgttggccaggctggtcttgaactcctgaaatcgtgatccaccggcctcagcctcccaaagtgctgggattacaggtgtgagccactgtgcccagccatgtaaagatttgaaggaaataatgagttttttttttttttgaaagagtcttgctctgttgcccaggttggagtgcagtggtgtgatctcggctcactgcaacctccgcctcccgggttcaagtgattctctggcctcagcctccctagtagctgggattacaggcgcatgtcaccatgcctggctaatttttctatttttagtagagacggggttttgccatgttggccaggctggtcttgaactcctgacctcaagtgatctgcccgcctctgcctcccaaagtgctgggattataggcgtgagccaccgcgcctggcataggaggtttgttaatagtagctgtgatggggttgtaagcttatgggtgatttttcttttcttttttttttttttggtatactccacaccgaacgtagtattaatactcagacaaaatgaataaatatttttctttttttttttttttgagacagagtctcgctctgtcgcccaggctggagtgcggtggcgtgatctcggctcactgcaagctccgcctcccgggttcacaccattctcctgcctcagcctcccgagtagctgggactacaggcacccgccaccacgcccggctaattttttgtattttctagtagagacggggtttcaccatgttagccaggatggtctcgatctcctgacctcgtgatccacccgcctcagcctcccaaagtgctgggattacaggcgtgagccaccatgcctggccagaaatgtttttcaaaat

SEQ ID NO: 1332 - DNA, 287 bp, Homo sapiens
gagacggggtctccgtctgtcgcccaggctggagtgcagtggcgcaatctccgctcactgcaagctccaccttccaggttcacgccattatcctgcctcagcctcccgagtagctggggctacaggcacccaccaccatgcctggctaattttatgtatttttagtagagacggggtttcaccgtgttagccaggatggtctcaatctcctgaccttgtgatccgcccgcctcggcctcccaaagtgctgggattacaggcgtgagccaccacgcctggccctatat

SEQ ID NO: 1333 - DNA, 313 bp, Homo sapiens
taagtattttccttttttttttttttgagacggagtctcgctctgtcgcccaggctggagtgcagtggcgtgatcttggctcactgcaaactccgcctcctgggttcacgccattctcctgcctcagcctccctagtagctgggactacaggcgcccaccaccacgcccagctaattttttgtatttttagtagagatggggtttcaccgtgttagccaggatggtctccatctcctgacctcatgatccacccgccttggcctcccaaagtgctgggattacaggagtgagccactgcgcccggcctaaaat

SEQ ID NO: 1334 - DNA, 6110 bp, Homo sapiens
gttttctttcttttttttctttttttttttttttgagacggagtctcgctctgtcacccaggctggagtgcagtggtgcgatctcggctcactgcaagctccgcctcccgggttcacgccattctcctgcctcagcctcccgagtagctgggactacaggcgcccgccaccacgcccggctaattttttgtatttctactagaggcggggtttcactgtgttagccaggatggtctcgatctcctgacctcgtgatccgcccacctcggccttccaaagtgctaggattccaggcgtgagccaccgctcccagccggaagttttctataaagctttaattattctgtcttcaggcttctctcattccttctacatgtagtgcaacaatgggtgttcagtaaagtagagtgacacagcgaggtcacacagcacattagagggagtgctagaaccagagccccaaatttctcattccccatgttcttttgctcacccatccaaccatccatccatccatccatccatccaacaaatattgctgagtttcttctatgtcagtagctctcaaacttggctgcacattggaatcacctggattccacccttagcaatcctgatttaattgggctagggagaggcatgaatattgaattttttgccttggaacatattgttttatatacaacacagtagtgaatagtgacttcattatggatttgtttctttatagatcacagtggcatataaaattcaaaatccataaacaaagagctcttaggttaaatgagttcttcctaaaaattcttaatggcatgctggtctattctcaagcggtacaattttataatgcaccatcctatatttagcatgtcacatttctacagtaacataatggaggcacaggcagtgcaagcagatttaaaccccttctacttctggactgaaggttagaaaaacacagcgtgtacacacacacacttggatgagttcttccaatacgttttcccccaaaaatgatagttttatcaaagaatttcaataactttcatagtttgtacaaccacactctattagctacattaaaaaggattcaacaaggggccaactacacagtagtaaataaacatgtttgagaatatctgctacattctctatctcctggagaaaataatatttacatttttttgtaaagtgatttaataactaaacaattctttcttttggtcgggggtaggtaatgggattttcaaagcttcacaggtgattccaataagcagtcaatttgagaagagtttctctgtgccagaaactgttcctgatgctgcagatactgcagtcaacacaccaaacaagataattactgacagaaattaaacatgtaattaataagataatatcaggtagaaataggtgctattaaaggggggaaaaacagtgtagtttgggtgtggtggctcacacctgtaatcccagcactttgggaggctgaggcaggcagattgcttgagcccaggagttcaagaccagcctgggaaacatggcaaaaacctgtctctacaattaacaacaacaacaacaaaaaaaacaaaaaccaaaaaacaagcaatgacaactacaacaacaacaattaaaaaaaaccagtgtaatgcaataaagaatagctagagtcagagtcacttttagatgaaggggccaggattaggctttgcagtgccatttgagagagacctaaatcccaaaaggacaccatagaagggcctcaggggaaagcattgctggcagaaggagcatctgaggtgttctggacagtttcccattacccttccagtcctgctctcagtcctctccttgtttgtttcagcacaaggctgaccagtaaggacttcagcagcagggcctggggtatgaggatctgggatgtgggtcttgggatgaaggggtgtctgggatgtgagtcctggggtttgggggaactgagttatagggactaggaagtaagatttcaatagtaatttgacaaaatatattaagaacttaaaaattttctttgatatgatacttccactttcagggcttatatcagatcttcatcacaatgttactgatgagaaaaaaaacctataaaccatctaaatagcccataataagggactggttaggtacattatagtctgtccatttgatatagtgaaaatgtgtgcttcagcaggccatgaacaaaaacagtgagagatgaggctgtataaatgttaacaatgtctgcctgccaaaaaattattacaacatttaaaaggcaaactggaaaaatatttgttacctgtgacaagaattcttccaaatgaggaagaaacatttaacagaaaaatgagcataagacttgaatagagaatttctaaaagaaattgtcactaaatgtctgaaaaaaaaaaaaaaactcagccttattctaaaaggttaaaatgtggtatctttttgcatggaaaaaataattaatgcttaaaagacactaaacaaatgccagtagcattccctagtcagtaaggttttacaacagttcttggacggcagtttggcaaagttaatttttcaccaaatattcattctgtgcctcttctgtgccaggtacagagaagggctctcaatgtgggtgagggtagagattcaggaccaaggagcagtctggagttttcacagagcatgggagattgtcttagtctttttaggctgctataacaaaatactatagagtggcttataaactacaaaaattttattttcctcacttctggaggctgggaagtccaaggtcaaggcatcgccaaatataatgtctggcgaggtcccatttcttatggatgtacagcttctcattgtcaccttacacggtagaagggtgaggagcctctgtaaggcctcttttataagagcacaatcctattcattatggtagagccctaatcacctcccatcttctaatactatcaccttgtgggagtcaggatttcaacatatagattttggggtaacccaaacattcccaccacagcagaggcattaccaacatttagcacccagttgttaaagacatcaaacttcctgcattgattttaggtcataaaaatttctttgaccagagaaatgtaagcagataggagattgtgccagttctgggtgaggtgtcaagaaccattctgtgttccctcactctcctaagctcaagccattcaccaggagaccgcatactcaggcaaccatacctccctccacctgggccctcaagcaagaaacaccagtgagagaccagagcagacctgagccccaagcccagccgagtaccaagcccacgagtgagatatcagtgttggttgtgaccaatgaggtttgggggttatttgttaagcatcattatcatgcataaccttataaactgtacaaagaattgttcccccagatgccataagcatgcccaaccctctgtctgaaaaatgctggatacagaaaagaaagagaacagagctctgggatgagcatgcacagtcaaccaatcatcacagcacagatgacatgacgcatgttgaaataagtgcctttaataatgagttgaaaagtgggatgaaaaagaggaacaggagtaacagttttgagtgggaagttaatgaaagtttctccagggatacaacatgtaagacttgagatgaaagagggttagacctggagcgggataaaggtttccaacagagagggggccatgaatagggaggagcttgcacctgaggggttggagcaggagcactaactaggtgccaactggatggtctggccccatcaggaccttggggaccaccaggaggggattggattttacctaagtgcaatgagagccatcaaagggaattttgttggtttgtttaaatcaaaatttgttttgtaaacatattagttttaccactggtgtgatttagcctttgatctatagaaatggaatttgagtttcaaatgtctccagtggcaggactgcccacaaagaatccctactaccattcacattttggggagggggttaatagcaccaactcaagtactatccttacactgtctagaaatgaaaggaaacaattgactcaggaatttcacttctaaatagcctgcatttacataacagtatccttggaattatagttctatcaagctttcatgtgaaaactaaatgagagaaaatgaaaattactttagaagagagaccaaaaaatactgttttctggattaatcagagacttcctgttaataaatagcaataagaatacaactttcattatcctgaaatcaaataagatgaaaagaattatactaagattcacacatatatttgtgtggatatatatatgggaaaaacctaagcatgtttccctactctctactcacaatcacagagtacttctgacaccagatgtgtggggggttttctccacatgccaaccaagcaactctgcagcaaacaccagctaggtgtcctgttattctgatcctacttacttggagacagccaggtaaagttgggttgagagctcaggataggtgagggctcagtcccaggagcctgaccccatttcacatgccaattacaaactcagattttgacctcagcttctggcccactgactataaaccagggttcccatgattccctccttgggttgtggcattgggcattctggtgagctctccatgtgatctacacatcaggcatgagactttatccctgaaacttatgtcaaattgtccagcttagcagtttttgttcttgtttggagagttgtagcaagatattgaagtaaactagaggaatttaagatccaatcctaaataaataacaaaaacttgaaaacaatcaacagggctatgatctaacaacaagtgtactatggttttcttctgaaacttaatttttctctctattgtcatccccacttctactaaaaataatcacagtaacaccaatttgtttctaaaataagtttagtctcaaacttggcctaattatttgtataagtacagcaagaataaccatataggctccttttaaatttgcttgatgataattttgacaagaaatcttaggctggactttttttttttttttttttttttgagatgaagtctcgctctgtaccccaggctggagggcagtggcgtgatcttggctcactgcaagctccgcctcctgggttcacgccattctcttgcctcagcctccttagtagctgggactacaggcgcccgtcaccacgcctggctaatttttttttttttttttgcattttttgtagagacgaggtttcaccgtgttagccaggatggtctcgatctcctgacctcgtgatccgcccgcctcggcctcccaaagtgctgggattacaggcgtgagccaccgcgcccggcctaaactggactttttaaaacctctcgatgctaggaagtcaaaccaatgcagacatcagactttgcccttaaagccagactctctatgcatgttttcaaatatgacattccagtcaaagctttgataatatagtcaatgttttcagttgtatcatgttaaagagaacagattcttgttgaatttatgcaaataaccatatcatcataaacaaaaataaggatacccatgaattatttcctgagttttggagggatcaggtagggaacaaaagcaaatgtttcaatttttgtttacaaaagtatgcattagcaaattgctataagttatagttagcttaaaagaaaaaaagttcccttgctgggtgcggtggctgacgcctgtaatcccagcactttgggaggccgaggcgggtggatcgcgaggtcaggagatcgagaccatcctggctaacacggtgaaaccccatctctactagaagtacaaaaaatcagccaggtatggtggcgggcgcctgtagtcccagctactcgggaggctgaggcaggagaatggcgtgaacccgggaggcggagcttgcagtgagccgagacagcgccactgcactccagcctgggcgacagagcgagactccgtctcacaaaaaaaaaaaaaaaaaaaagaaagaaaaaaa

SEQ ID NO: 1335 - DNA, 2604 bp, Homo sapiens
tttttttttttttttttttgagacggagtctcgctctgtcgcccaggctggagtgcagtggcacaatctcggcgcactgcaaactccaccttccgggttcacgccattctcctgcctcagcctcccgagtagttgggactacaggcgcccgccaccacgcccggctaattttttgtattttcagtagagacagggtttcaccgtgttagccaggatggtctcgatctcctgacttcgtgatccacctgccatggcctcccaaagtgctgggattacaggcgtgagccaccgtgcccagcccatggaacaccatttttaccagaaaaaaactactgacagacaaaccagggttattcagacttaagtatgtggcagaaattctgtcaaaaatgtaacaaagtgagattgtcacttcaagtaaaacaactgacagtttgtgttaccaatgataaaattctagctttcaagtgaaaactagaattttggaaaatcctatctgccactgtgagcttgacagcttcccaatacttgaagacttttccgactaaataggaagacattaaggaaagtgattgtttgatactgtataatgaaatatgtcaacattaggaagaactgtataacacagtgaaccactaaaatttccgaaggacttatgcttaatgttttaaaaaacaggcatggattcaacatccattcaaagtgtaaggtacaccattggatattaatgtaacagtgtaaaacaagtacattgatatagtttcaaattccactttgtaactaacctttaaaaagctacgatttgtcaaactttgatgtgatatcaaagaacatccatgattatctttaaaaagctattaaaatattcttctttccaacttcatatgactgtgaggtgggattttcttcatcttaaaccaaaatgaaacagtgcagcagcttaaatgcagaggcagacataagaatccagttaccttctattatgtcacacattagttttgcaaaaatgcgaaacagtgccacttctgccgggcgcagtggctcacgcctgtaatcccagcactttgggaggccgagacaggcggatcacgaggtcaggagatcgagaccatcctggctaacaggatgaaaccccgtctctactaaaaataaaaaaaaaaaattagccgggcgtggttgcgggcgcctgtagtcccagctacttgggaggctgaggcaggggaatggcgtgaacccgggaggcggcgcttgcagtgagccgagatagcgccactgcattccagcctgggcgacagagagagactctgtctcaaaaaaaaaaaaaaagaaaaaaaaaagaaacaatgccactcctaggataactgttatcaaaaccaggaaataagtgctgatgatgatgtggagaaattggaatccttaggtactgccaatgggaatgtaaaaatggtacagccactgaagaaaacagtatggtttcaaaaactaaacatagtactatcctatgactcagcaattttcacttctaggtacatacagtatcccaaagaattaaaagcagggattcaaacagacatgtgcacattaatgatcatagtagtagtattcacaatagccaaaaggtggaagcaacccaaatgtccactgacaaatggataaacaaaatgtggtatatacatacaatgaaatattattcagttttaaaaaggaaatcccgacacatgcttcaaaacgaataaaccttaaaaacgctatactaaataaaccagacgcaaaaggacaaatattgtctaattccacttatataagggacctgaaatactcaaattcatagagaaaaaataatggttaaccagggattgggggaggaagtaatgggcagttattgtgtaataggtacagggtttcagtttgggatgatgacaagttctggagatggacagtggtgttggctgtacctctcaattgtacacttaaaaattatcaaaatggtaaattttgttatatcttaccacaattttaaaaaaaagggaaaaaaccccacaatgttaatcttctcactgattggggggcgggggggttggtttggaaaatagttatttttcattaaaatcactatttatgcacctagcctatttattagttttgtaaattaacaactactttaatttttttccagctttaatgtctaatatggtaaatatagacagatataccacacaaacagaagctcttaggtccacggtaatttttgaaaggtaaaggggtcctgagaataaaaagtttgagaattgttcttttttttttttttttttttttgagacggagtcttgctctgtcgcccaggctagagtacagtggtgcgatctcggctcactgcaagcttcgcctcccgggttcatgccattctcctgcctcagcctcccgagtagctgggactacaggcgcccgccaccacgcccggctaattttttgtattttttagtagagacggggtttcaccgtgttagccaggatggtctcgatctcctgacctcgtgatccacccgcctcggcctcccaaagtgctgggattacaggcatgagccacagcgcccggccgagaat

SEQ ID NO: 1336 - DNA, 306 bp, Homo sapiens
ttttttttttttttttgagacggagtctcgctctgtcgcccaggctggagtgcagtggcatgaactcggttcactgcaagctccgcctcccgggttcaagccattctcctgcctcagcctccagagtagctgggactacaggcgcccgccatcatgcctggctaattttttctgtattttttagtagagacggggtttcaccgtgttagccagggtggtctcaatctcctgacctcatgatccacccgcctcggcctcccaaagtgctgggattacaggcgtgagccaccgcgcctggcctcaaat

SEQ ID NO: 1337 - DNA, 27666 bp, Homo sapiens
ggcactgacaggacttgacacattctaatctcctgagggccgctaacaacatagatgacagtctggacaacacaaagggtcaacaggtgctccgagtgtccggcagggctaattggtaagttcgtctcttatacaaggcccgtgggacaagactgggagaggtatttttctttttttcttttttctttttttttttctttttttctgagacagagtcttgctctgtggcccaggctggagtgcagtggcgcaatctcggctcactgcaagctccgcctcccgggttcacgccattctccttcctcagcctcccgagtagctgggactacaggcgcccgccaccacgcccagctaattttttgtatttttagtagagacagggtttcaccgtgttagccaggatggtctccatcgcctgacctcatgatctgcccacctcggcctcccaaagtgctgggattacaggcgtgagccaccgcgcccagcctgggagaggtatttttcttaactaaagtacagaaaataacagagaatcaagaacaatgaagaaacagagaaatatgttccaagcaaaagaacaagataaatctccagaaaatgcccccggtgaaatgaagataagtgacttaccttacagacaattcagaataatgatcatgaagatgcttaccatgtctaggacagcaatgcatgaacaaagtaagaatttcagcaaagagacagaaaaaagttcaaaagaaataacagagctgaagaatacaataactgcaataagagctcaaaagagaagctcaacagactaaatcaagcagaagaaaggattagcaaactagaagataggtcactggaaatcattcagaggagcaaaaatgaaaaagaatgaaaaagagtgaagatatcttaagagagttaggggacatcaagccgaccaaaataggcattatcagagtcccagaaggaggagagtgagaagagatggaaagcttatccaaagaaataacagtcacgagttgcagatcaacatttcagtcaatggcagaccacatgagcacagtggccatagcatgcagcctagctgtgtagtaggctgtcccatctaaatttgtgtaagtgcactccatgatgtccacacaatgacaaattcaccttctgatgcattttcagaacgtatccctgttggtaagcaacgcatacctataatgactgaaaacttcccaacccagggaaggaaatacaaatccacatccaggaagcccaaaggacaccaataagactgatctaaagcaacccacatcaagacacatcataatcaatttcaaaagttaaagacaaagaattctgaaagcagcaagagaaaagcaatgtattatacacaagggaaaacccgtaagtgtaggatttcttctgggggtgatgaaaatgttatgaaattagattgtgatgatggaggcacaactctgtgaatacactacaaacctttgaattgtatgtttttaaatggatgaattttacagtatgtgatgcacaacccaatatagctatctaaaaaaaaaaaaaaaacctaacctatttgtgaattattttgtagaacatgttttctcttttttattcctttattctgttttcctgcagttccctgactgtggtggaataagcttggaggagatgccttcacttactctactgagaggcagagaaaggttaggtatggaagtaaaatgtccataaataatatcaattctgcacctccaaagatgtgtgcctcttacacaaatgtctctataatctgaggggtccaggctacctaacttgcttcttgttgcttcactgcccgttagttcctctcttcactctctaagcttcccatcccctttggatcagcagccaggagcccagtgggagggtatcttacagggcacgttgcacttctgcaggcagtaggccagctccaggggccgcactgctttctgccggctgtcctgcatcttctccagcagcagaagcatctggaaagggacgcttctcctctgctcgtcagctcccctgggcaccgtgatcctgccacacaagaacagccagaaacctccttacatgtagttctcaaagctaggtgcacactggaatcacctgggagaaattttaaatcttcatatccaggccactcccatacaaattaaaccagaattctgggtccggggggcggggcgcgggcagttatcagaatttttcagttcctcagattatttcaatgtgtggtcaaggttgagaagcaccatgtgagtgaatctgctctacaggggaccctctagagagggggatcagcatgactgctgccttggcccctctgcaccctgcccagcaatcgtgctagagcagacggcagatgcacgaggtcctggctccacatctcgggcaagcagcaaaatgtccagcctaaagctctccagactgcagaggcacatgctgggttaggtcctgggaagaaaggcaacatgaaaggctgtccgtgtggtttggcaatgattcatttaatcacaggcatttttcggatgggaaaaaggagagagcacagggcagaaaaggagtgatagagagagacagagggagagagtgcattgtgtgagtgttggtggaaggaggggtgtgtactccccactgacttactccttctccgactttggtctagtcccaactctgtcttttaaccaagtcagtggctgtcaatcctggccgcatttaaaatcacccaaagagggctttaaaaaagtaccaatacctggccgggcgcagtggctcatgcctgtaatcccagaactttgggaagctgaggtgggcaaatcacctgaggtcaggaaattgagaccagcctggccaacatggtgaaaactcatatctactaaacatacaaaaattagccaggtgtggtggcgggcgcctgtaatcccagctacttgagaggctgaggcaggagaatcccttgaacccgggaggcggaggttccagtgagccgagattgcaccgtcgcactccagcctggggacagagtgaggcttcatctcaaaaaaaaaaaaaaaaaaaagtaccaatacttgggtcgcaccccagaccaacctaagaagttttagaaataatgtgtaggccagaatatgcagaagccaatctttcctctgccagcttttgagagaagatctcaaaaagtccaagtcactgtgaataactgaatatattaaaaatgaaataatacaggccaggtgcagtggcttacgcctgtaattccagcactttgggaggctgaggtgggtggatcacgaggtcaggagatcgagaccttcctggctaatacggtgaaaccccgtctctactaaaaatacaaaaaaaattagccaggcatggtggcgggctagtcccagctactcgggagactgaagcaggagaatcgcttgaacctgggaggcagaacttgcagtgagccaagatcatgccactgcactccagcctgggcaacagagcaagactccatctcaaaaaaaggaaaaagaaataatacaaatgctcatcagcctgaagaacagtcttacctcttcaatatcctggtgaagtccacattcattacgaacacctgaatcaaggagttaaggcagcaggtctgtccaatgttgtgtaaaccaaccaggcctataaggggaagagaaaaaaatgctgagggcaaggcctagggtaaagaagttgacaaggctgggcatggtggctcatgcctgtaattccagtactttgggaggccgaggtgggcggatcacctgaggtcgggagttcgagaccagcctggccaacatggtaaaaccatgtctctacaaaaaaaatccaaaaatcagccgggtgcggtggctcacgcctgtaatcccagtactttgggaggccgaggcgggcagatcacgaggtcaggagatcgagaccatcctggctaacacggcgaaaccccgtctctactaaaaatgcaaaaaaaattagccgggcgtggtggtgggcgcctgtagtcccagctactcaggaggctgaggcaggagaatggtgtgaacccaggaggcggagcttgcagtgagccaagatcacgccactgcactccagcctgggcaacagagcgagactccatctcaaaaaaaaaaaaaaaaaaatccaaaaatcagccaggtgtcatgacaggtgcctgtagtcccagctccttgggaggctgaggcaggagaattgcttgaacccaggaggcggaggttgcagtgagccaagatcatgccactgcactccagcctgggcaacaagagtggaattctgtctcaaaaaaaaaaaaaaaagttgacaaaaatctaatgtttttcttaaagctactaaggacatgaagtcctgtaaagtctctcaagtacgaagtgttcattcagcttgcaaacaaatcggagagaagatatcaaacatgaacctttaaaaagctctatcacaagggccaagcacagtggctcacacctgtaatcccagcactttgggaggccgaggcgggaagaccacctgaggtcaggagttcaataccagcctggcctacatggtaaaacctcatatttactaaaaatacaaaaattagccgggtgtggtggtgcatgcctgtaatcccagctactcgggaggctgaggaaggagaactgcttgaacctggcaggcagaggttgcagtgagccaagatcgtgccactgcactccagcctaggcgacaaagcaaaactccatctcacacacacacacacaaaaagttcgataacaagaaaagttttaatatagtccattaggaaaagtgagatgtcaccaaaagtatatattactcactgccaaatgagtagtatgagcaattgttgggagagaaaaaaaaacattagagaaagcataactgagaatatggcttcctttcattcaaatcgttctccacggagctaagtccaaatgtgcatctgtggggctcagggataagagggactccccagtatgtctatgttggactccagcggagaggtctctgcccagttcccactacagggaggcaggaaataaatcagaaggttactttggggaagattcacctaatccagtgtcaccctgagaggctgaaaggcagaaggaacttataagaatatgagaaaaacaaaagataacatttgtctgacccctagcaaccaacctcctcttttccaacccaaccttaggctcagcagaccccacaagggaagtaccactaatctcaggattcttggggaaagggctttggcttacaagataggacagtaagaaagtaacaacctggggtcacaggtgagcacagatttctactcccagactatcaggagcacattgcttccagacagacccatacaaaggtagcagtaaagatgggaactaatgctaagtgcctctagaatcccagcactggcttaaagcagtttccacagatgaccccatttaatcctcccaacaaccctatgtgcttggtactattattacccccatttgtttgtttgtttgtttgagacagagtctcactctgtcacccaggctggagtgcagtggcgtgatctcagctcactgcaacctctgccgcccaggttcaagcaattctcctgcctcagccacctaagtagctgggattacaggcacctgccactgcgcccagctaatttttgtatttttagtagagacggggtttcaccattttggccaggctggtcttaaactcccgacctcatgatccacttgccacggcctcccaaactgctgggattacaggcatgagccaccgcgcccgaccttgtttttgttttttacagatagggtttcactatggcccaggctgtatccccatctaaaagatgcagaaactcaggcacaggaaagcatgagccgtcgaatacaaagctctgcggcttcagagcggagggggtgagccgaacatttacatgcagtcaagaagaggaaaacgggaggggtctaatgaccatgagggtagtcccaggccctgggacgctctctgggctgctctctcttcatgttgctgtcttcttccttcttttcttcaagatctgccggggactgcgaggactcagccaggatggactgacagatttgcctcaggagcccaaacgccttgctcattcgtgatcactccaaaacccccaggccgcagctgcctggcccgcgttcaggacagcacgacttcacttccaggaagcgcttatgtgagccaggcacgatggaatctctgtgaaaatacaatgcgggtaggtaagaattagagaaggaggaatgtgtattcatgtaatccgttctgatgccaaagagcaggtcttagagggagataaatgtttggggagactgactcacagagctctaggctggaaatgacagctaggctacacatcccctaacctgggtcccaggcgtttccattcatcctcagagccgactgccaaatcctaaccgggagcgccctcttgggaaaggacagggaagcgcgcataggactttgctttacaacccaggaccaggcccacttcagtaaaaagccagcactaagcaagaactctcagcccctgatgccaggctggcatacaggggaagcctctcaacccgcccaacacccaaggggacctgcggccctggcagaacagcctcgtattctggcccgcaacactgccggccagctgcagcagtcagataaaccttagctgcaggcaggctgtagctacctgtcggccttaggcacatcctggtgctgggctggtctcatggcatgaattctgggggtgtgactcaatattgtctcagcctcagtggccataggggtacccgtgtaccccctcccccaacccagcacagctgtgtgaagagagacactgtttgcttgggggaagaagaggtaagtggagtacttcgccttggaacccagtgtgtccgaaattggtgggtgcttggtctcactgacttcaagaatgaagccgtggaccctcgcagtgagtgttacagtttttaaagggggcatgtccgcagtttattccttctgatgttcggatgtgttcggagtttcttccttctggtgggtttgtggtctcgctagctcaggagtgaagctgcagaccttcgcggtgagtgttacagctcctaatacggcgcatctggagatgtccgttcctcccggtgggttcgtggtgtcgctggcttcaggagcgaagctgcggaccttcacggtgagtgttacagctcttaaggcagcgcgtctggagttgttagtccctcctggttggtttgtggtcttgctggcttcaggagtgaagctacagaccttcgcggtgagtgttacagttcataaaggcagtgtggacccaaagagtgagcagtagcaagacttacagcaaagaatgaaacaacaaagcttccacagcatggaaggaaacctgaccaggttgccactgctggctcgggcagcctgcttttattctcttatctggccccacccacatcctgctgattggtccattttatagacagccaattggtctgttttacagagagctgattggtccgttttgacagggtgctgatgggtgtgtttacaatccctgagctagacacaaaacgtctccacgtccccactagattagctagatacagagtgtggacacaaaggttctccaagtccccaccagagtagctagattcagagggtcgactggtgcattcacaaaccctgagctagacacagggtgctgattggtgtgtttacaaaccttgagctagatacagagtgccgatcggtatatttacaatcccttagctagacataaagattctccaagtccccaccagactcaggagcccagctggcttcacccagtggatcccacacctgggccgcaggtggagctgcctgccagtcccgtgccgtgcgcccgcactcctcagcccttgggtggtcgatgggactcggcggcgtggagccgggagcggcgctggtcggggaggcttggtccgcacaggagcccatggctgcggggtggggaggctcaggcatggcgggctacaggtcccgagccctgccctgccaggaggcagctaaggcccggcgagaaatcgagcacagcagctgctggcccaagtgctaagccccttactgcctggggcttgcaggccggccggctggccgctccgagtgcgggcccgccgagcccacgcccactcggaactcgcgctggcccacaagcaccgcgtgcagccccagttcccgcccctgcctctccctccacacctccccgcaagctaagggagcccactccagcctcggccagcccaggaaggggctcccacagtgcagcggtgggctgaagggctcctcaagcgtggccagagtgggcgccaaggccgaggaggcaccgagagcgagcgagggctgtgatggctgccagcacgctgtcacctgtcaccaggactaggctcactacagtaaaacccagtactgggcagagcctcatcaccctgatactagaccagtacccacaggcagatctcaccccaccctagtgccagatgagaacccacagccccagtaacagggactggcgatctggcccacatcactacctgacaactacagtggccctgggccctgaataacttcagcagcagcaagcacgccatcacagctgtgggtcttgggcgtgccccagtgctgtgccagtctcggcagctatggccttcaggcataacccagggctgtgtcagcctcagtggccaaagaattccaaccacagtgatgctgggcttagagcaccccccagcactacaacagctgaagcagtcatgggcttagggtcctgaccaatcagcctctccctaatctcctatgggtttcctgatgaaagacgagcccaaacaaagccaggcaatgaagactggcttaggtacctatgtcaatgcacagacattgacacacagccataaggatcaaggtcaatcagagaaacatgacatcaccaaatgaacaaattaaggtgccagtgactaaccctaaagatatagagatgaggcctggcatggtggctcaggcctgtaatcccagcagtttgggaggctgaggtgggaggatcacttgagcccaggagttcaagactagcccgggcaacatactgagaccccatctctacaaaaaaataccaaaaaaatttagacggtcatagtggtgcacgcctgtggccccaaatactgagaagggtgaaggaggaggatcacttgaggccaggagtttgaggctgcactgaactatgattgtgccactgcactccagcctgggcaacaaatgagaccttgtatctaaataaataaataagatgaaataaaataataataatgggtaacatcgaagcactatttcttataaaaggtgaaagccttttatatgtactgtcttatttatccttacacagccatgtgaattaattactgttatattgccatttgacagatgagaaaactgagatacaaagaagtaagtgcatttcccactggcaagtgatgggccagatgtagacaagctggacggggtttaagtccagctaacatgctgctcagagtgaggaataaactcaaccaaatcattggtgggaatgtaaattagtagagccattatggaaaacagtatggagattccttaaaaacctaaaaatagatataccacatgatctagtaatgccactgctgaatatatatccaaaggaaagggaatcagtatgttgaagagatatttgcactctcatgtttactgcagcactgctcataatacccgagatacggaatcaacctaagtgtctatcaaaagaggaatggataaagaacatgtggactatatacacaaaatgggatgttattcagccattacaagagaatgaaatcctgtaattcccatcaacatggatgagcctggagtacattacgttaagtggaataacctaggcacagaaagataaataccacatgttcacactcatatgtgaaagctcaaaaagcttatctcctagaaatagagaatagaaagccaggcatggcagttcacacctgcaatcccagcactttggttggctgaggcaagaggatagcttgaagccaggagttcaagaccagtctaggcaacatagcatgttgcctaaataaaataaaaaatattttattttctaaaaataaaaataaaattagcctagcatggtggcatgtacttgtggtcccagctacttgggagactgaggcaggagaatcagttgagcccaggaatttgaggccacagtgagttatgatcgtgccacggcactccagcctgggcaacagggcaagaccctgtctccttttttttttttgagatggaatttcactctttttacccaggctggagtgcagtggtacaatctcagctcactgcaacctctgcctcccgagttcaagcacttcccctgccttagtgtcccaaatagctggaactacaggcatgtgccaccacgcatggctaatttttgtatttttagtagagacggggtttcaccatgttggccaggctggtcttgaactcctgacctcaggtgatccacccatctcggcctcccaaagtgctgggattacaggcatgagccaccgcgcccagcctggaatatattcttaaattcatgttggatggctcagataacaacaacctctttttcttagtaaatattgactttcaatagttataaacagttgttcttcttacaaggcccagcctaggaggactcaactgaaatgatgacagcagacaattccatcagcaagaaagaggattttgagctcatcattgagggaaagctgatgaaagagagcagagaggttccaggctgcattttccaagatgttgtcctcttctccgccaagacctcccagatacttcagtaggatatagcagtaaaacctcatggagcagatcatttgagcaggctcggtcccaaagggaaacaaaatacagcagcctttcagggtagatcacactggggagacagggaggcggggcagcaaggaaaggaaagtgaagcttaaaaggtctaaggaggatggggagggcaaggcgagcagagagaccgcagctgaagttagcaggggcaataagcatccaccagagaaaacagcctgggcggattccaaggaaggggattttcaaactcaactgctgactcaaaaaaagacccccaggccaggcgcggggtctttgtttgagactctgtctcaaacaaaacaaaacaaaaatcccaaatactaaactaacttagctcccaccctacctgaatttttttttttttttttggttcacgttctctcatgatcttcccgaaatgttatccttaagcttcggggagaggtgagcaacggaaggaactggcccaggcccaccactaaagaagccccaggaccaatcggggtcctcagagaagccccagaagagccaggaacaagctgcagaaaacctggggagggtggggcctccacccaatactccactcacaactggactctctgccaggaaagccaactccaacatttagatgccctaaaaggaacaaaattaacctgccaggaacatgattcaagcagcctcggtgtcttccgacccaccccatcatggcaaccacaattgtagaccgcagtctcgatgacgtgttcacattattttgcatttcttttttctttttttatttttatttttatttttgagacggagtctccctctgtcgcccaggctggagtgcagtggcccgatcttggctcactgcaagctccgcctcccaggttcacgccattctcctgcctcagcctcccgagtagttgggactacaggcgcctgccgccacgcccagctaatattttttatttttagtagatgggtttgcaccgtgttagctaggatggtcttgatctcctgacctcgtgatccacctgcctcggcctcccaaattgctgggattacaggcgtgagccaccgcgcccggcctattttgcatttcttgagtaatcgtaatatgcgggttagaacacacggattacaacactttggatgaaaaaccacataatagggaaattttgggactactctctctcaaaaaaaaaaacagctcgtggaaaaactaggacttaccttctttgaaactatgtttatgttaagcattttcccctttgtaagctcatcattgtgtaaaagtgtcagaactgtgcaacacattttttaacagtccaaaagcaagttctttgataaatcaatatgaagccgtgcacctgtgttactctccctcccgttttgttcctgcgaacacatcggtaacctgcattcactctccatccaactctgttcaataccagaaagaaacttcagatgaaatgcttttcagtatttgccttgttttctggaacaactttaaagtacaaattatacctaaataagtacaaattaaagcctctgctttaattttcaaacactttgaacccagattttcaggggtctcaaaatggagttttgtgtttaaaagtctaaatttagctttcttccaaggaaaagggtgtgaagaagagaggttaagactaaaatactctgatttgcagagtttgacaacatccttccaatttctcaatatgaatgcccactgacccagccattccacttctaggaattttccaccgatatatttgtatgaatgtatacataaaattatattcattgccgtatctgtgccagtaaaaactggaaacaacctaaatctccatgcattgtttaaacaatgtacttcccataccatgtatcaggtttttttgtttgtttgtttgagacagtttcgctctgtcgcccaggctggagtgcaacggtgcgatctcggctcaccgcaacctccgctcccgggttcaagcgattctcctgcctcagcctcccgagtagctgggattacaggcatgcgccaccacgccaggctaattttgtatttttagtagagacggggtttctccatgtctgtaactcctgacctcaggtgatcctccctcctcgatctcccaaagtgctgggattacaggcgtgagccaccgtacccggccgaatcagttttttgttttatttttaatgccattaacacatctatatgtcctgccatgaaaagatgtccataatatactcagtggacaaagcaagttcgaaatgattttaaagacttgtacatagaaacatttctgataaggtacaaacaaaaatgatactgagtggaagactgcgagacacatttgtctgcattgtttgaatttttttacaagcttacaacacttctgcaatttctttttttgttttaattaaacacaaagtcatgtcaaaagtccaaataactatattagcttagaaaaaaattcactggcccaaaatatatgcacgtagtaaatacagatcactatcataatttgcagagcacaattattacttaattccttaattatctgactggcataggagcagagttggatgtctgtgctagaaagaaaacttccaaaatgagccccgaacttgcctcaagcgccatgcaagcgtccagcctccgctgctgagttccacgtcgggactgagccggggaccgagctgggaccgaagttccgctccgggcccgccttggtctggccccgcgctcgtggcaccccgcccagctttcgttttccactgaatggaaagcgaaacttacagcggcctccgcgccgggagctgggcgccagcgtgcggggaaaccctgccggcccgagcttcccgcggctgccgttgcagccgcgcacctgctccagacttccagccctcgctttttttttttttttttttttttgagacggagtctcattctgtcgtccaggctggagtgcggttgcgctgtctcggttcactgcaaactccgcctcctgggttcaagcgattctcctgcctcaggctccggagtagctgggattacaggcatgcgccaccactcctggctaatttttgtattttagtagcgatggggttccgccatgctggccaggctggtctcaggtgatccgcccgcctcctaaagtgctgggattacaggtgtgggccaccgcgcccgacctacaggcgcctttttatttgcgattttaaggtccttgcaattagcctacgtgttagagtcatttggcgtttggtagtatccatggcagcattttttctttcttaatgctattgtatttcttggatcgggtgtcttcacatcaccggcctgtggcttggatgcggcacatggtgtaattaggagctcccctgtgggcatgcagatacagatatttctccacttaagaaggggtcagggggcgcggtggctcacacctgtaatcccagcactttgggatgctgaggcaggcggatcacctgaggtcaggagttcgagaccagcctgaccaacatagtgaaaccccatctctactaaaagtacaaaaattagctcggcgtggtggcgcttaatcccagctacttaagaggctgaggcaggagaataacttgaacccaagaagcggaggttgcagtgagcagagatcgacaagagcaagactccgtctaaaaaaaaaaaaaaaaaatggggtcaagtcccagtgaacccatcatgaagtcgaaacatcgtaagtgaaaccacggtaagtgatggaccatctgtgtatatataaggttaagagatctgtaacatgcacaccggaaaggcttattacctctttagagatgtatttcttgtatgtagactcatgggggtaggggcagaagggttatctgctaggggcctcaaactccagccgctggaatttgcgcaggaaagcagggtacaattcccccaaagcgatcattctttctgaaagccgtccccgcagcaacagacaaatagcctccaaaaacccaaagctgccagaacctcactgaagcgttggtagggtctgcagtaaggtacaaaataccatggcatgaagatgtataaacgtgtccataatagggtggatgtgtgttagaagcatgagcacagatatacacatacaggctatccacacgtccatcgtcagcccagactccgcttacattgctgctggaacggaggcagtgtcgcccacagtgcagcatgttctccctggaaggctggtggactttgcgcagtatggtgtttacacaggtacacggtggtgggcgcagggtccgtcctcattatatttgctgaccaatcagttatataaccagcttcatacatctggtaagtcttgtccacaaacaggaacctcaaaaactcaagtgagggcaatgaggagaggaggttgcaaaatttgataaaatatgctaaatacagcaagtcagtagaaggctaaggagcaagctgcagttgcttgcagcaactatcagcagaaaactattaatagtcaatccaatgattctatctgaatcttggtaggtcggtggagcaaagtaattggtgttgctgccccagtgcagaatggacaagggtgaaccttgggttggaggctggactatataatgtaaggatccattacacttctatggggctcttccttccgtccttcatggtaccctcctgaacaattccgtgctaaggccatcaggtgtgtcaagcaaagtgggcgtttgtgtagtatgttccacagtggcccaagcagggtgctggactggagcaggttgaggagggtggcagcacagtggggctgcccagcacaatgtcagacacaaatgggtgctggtgcagcccggcccagggtcacagcccaagcaatttgaagatgtggcacatcccggtattggagtggcccagtgtgtggtgtccagggagggcagggtgctggtggagatgacagattagttacatacagggggatgaccaggtaactgaatgtattaaggataattggagccagagttgaaactctcagagataggagttacaaataaggaaagggagaatgagcccactagtgttgaactggaattggacttagcagtgtggatccatgattttcagtatgtatacacagatagataaagaagtacaaggcgggtggatcacgaggtcaggagattgagaccaccgtggctaacacggtgaaaccccgtctttactaaaaatacaaaaaattagctgggtgtggtggcacacgcctgtagtcccagctactcggaaggctgaggcaggataatcatttgaacccgggaggcagaggttgcagtgagccaagattgcatcattgcactccagcctggcgacacagcgagatcccctatcaaaaaaaaaaaaaaaaaaaaaaaaaaaaaagaagtacatgtggaggtaaacatgtgtatacatgcatacatcccctgacttggtctgtagggggcctgggaacagtgacaccccaacagtacatcttgcacccagatcttggtttctaattcccattctctagtaaaaggaaccaatgttgcttggagaaatggctgtttctggggttaaggcagagaaagtacaagatgagcctaggacatcttgttctgccagcaagtaagggaatgctccaagaatgatggggatgtttcaaaacgatgcagaagccagctccaagaccatgctcccactggccaaatttggaacaacttgagcattaaaagaaatgatgatttgttctgttttgtttttgtttttgagacggagtctcgctctgttgcccaggctggagtgcagtggcactatcttggctcactgcaagctccgcctcctgggttcacaccattctcctgcctcagcctcccgagtagctgggactacaggcacccgccaccacgcccagctaattttttgtatttttagtagagacggggtttcaccgtgttagccaggatggtctcgatctcctgaccttgtgatcctcctgcctcggcctcccaaagtgctgggattacaggcatgagccaccgcgcctggcctgaaatgatgatagtaacatttcgacctgttaaataaaatgggaagccacacttcataccaataaaagtagatactgaataaattaaaagtttgatgagaaacaggatatttacacagtttcaaagtactctcccacaaaatacatattattaattaccattattacatacatgtgatacaggttcattctgcccgcatgccataaatccatcactgtgacaggttttgcaaaagagaaaagatttattcgcaaggcagcccagtgaggaggcaggagaacagctctcaaatcttcctccccaaagataagtcttagggatatttaccggtgagagaagcagggtggtgtaaggtatgggcaaaggtgattggcagtgggggaaaatgaggcagtcggtgaccactgcaagcatagtcagggttcgtggcacttcacagggcacatgttcaaaaaatgacagccttagcgtgatctgagggtgtcgcttggggcctctgatgtcaaaaggccacttcttttgtttgcacaagcctacttgaaagctcacggtctcaactggtttgaactaggcaggagctgccccaagttcctgaaaaacaatttgaacgatcatgacagtagtgacatacatgttatctgtaaggaagccggcaaggttaagttacagcgctcagtggcgcggccttcagcttcacagaaaaaaaataacaaaagcaagtgacccaaagcaagcagggcaggctaaattgggcagacctaatcagatgaaccccatggtctcatatgtaatattacattataactataaagaatgtaattaatgtaaatattcagtacaagaaagtcatcagtgcggggaacactggaattgcgtgccaccagaggacagagtggagccagcgcggtatcacttctgtgctgttcccatcgaaggtcagtaaccggaaccccttcgccaggacgcgggtcctggccaacccaaatcgaggggcattctgcagatcagctggtctgccatcttcaaacgattcatgaaaatcaaagacagctttgaggaacggctccagactggcagagaccaaagaggtcatagatgaacaggagatccccaactggatcctttggctgtaaaggacaatattggcacaacgggtgaagcttgaatggggtctgaggattaggtggtagtaacttcacaggcggggatttgggagaaatgcaatgtcacgtggaaaactgactctcaaatagttcaagaaggaagttctttggactatacttgcaacttttctgtaggcttaatactgtttcacaattttaaaatgtaaaataatagtaccaggtagtagttttttattaagacagattgtgctttttgaaagcattggtggaaagatttctcaaaatcatgcgcgaaagagtttataatgaaattgtgtaatatttgtttcaaaagaaagtgtgggccctgagaagcattttctgtagtttacacagtatttctgccaatttgggatactttcagtgtccctggaattctcatcatctgaatttcttactctttttccctttaaaaaaaaataaaataaagaagtatgaggcaaaaggccacacctacctacctcactttaaaattctgtctaaaaacctggtcacagaggaagatgttggctaactttaatgcgataatctagttcccctcaaaatggaaagctatttagaaaaaagctatttgcccaacgtgaggaacaatttatagaaactgacaagaatttttgtcctggggaaaggacagggtttgttgcatgggataaggggaagtgatgtggccgggcatgatggctcacgcctgtaatcccagcactttgggaggccgaggcaggtggatcgtgaggtcaagagatcgagaccatcctggccaacatagtgaaacctcgtctctactaaaaatacaaaaattagctagatatggtggtgtgtgcacctgtagaaccagctactcgggaggctgaggcaggagaatcgcttgaacctgggaggcggaggttgcagtgaaccgagatcgctccactgctctccagtctggcgacagagcaagagtctgtctcaaaaaaaaaaaagcaagtgattttttttaaaaaaagaaaacagaaccgatgtctgaaaaagtagtactcctttacaaaacacattctctacaaacgcgtggtttcatgtgacctctgctcagtccctttccacaactttctcctgcctattttcttctctgcattttgtcaggatgctttttattgtaaattttactgtgttttgcatgcttccaaatataaaaaataatttttaagatgaattaaacattgaacctccctctcagtattgttttgggaacatgcattctcctgaggagagggagctgttgagtggaagcagtcaaacagaactccacatttcattttcctggcatgggtttcagggtgcaactcaaacagaatgtgacttggcatctgtcacctttcccaggcactccctatcctctggcaatttgttgccttaatggagaaccattcaaaattaaatattttatattagaaaagaaatgttaaacataaagaaaagttatacaaatattataacaacctagtgagccttccttcactaattttctctctcatacacacacatctatgtgtatgtgtgagtacacagtatatatgtgtatatatttacacaatcactttttttcttttgctggactacttgagagtaaattgaagagattgacattcttcagctctaaataattcaatatgaacctcataggatcaaagatgttttcatacataaccccagtgcaattattaccaaattcagataatttcatatccgtacaattttcccatatataatatattcaatatttaaattttgacagttatcccagtattgtttatacagcaactgttttcctttgtttcttatttttatagatacatagtaattgtacatatttatgtgttacatgtgatactttgatacatgcatacaatgtgcaatgatcaaatcagggtaatgaaggtattcatcacctcaaacgtttattatttctttgtactgggaacattccaaatcttctcttctagctattttgaaatatacaataaattattgttaactattatcactgtacagtactatcattccctctatctaactatctttgtacccataaccaacacttttcatccttccctccctcctattgcttgccagcctctggtagtcatcattctactctccacctccctgaaatcaacgtttttagctcccacataggagtgagaaggtgggatatgtatctttctgtgcctagcttatttcacttaacgtaatgtcctctggtttcatccatgttgctacaaccgacgggatttcattctttttatgactaaatagtattccactgtgtatatgtagtacatttttttttttttgagacaaagtctcgctctgtcacccaggctggagtgcagtagcgtgatcttggctcactgcaagctccgcctcccgggttcacgccattctcctgcctcagcctcccgagtagctgggactacaggcacccgccaccacgcccggctaattttttgtatttttagtagagacaggttttcaccgtgttagccaggatggtctcgatctcctgacctcatgattcgcctgcctcggcctcccaaagtgctgggattacaggcgtgagccaccgcgcccggccttatctagcatgttttttatccattcatctgttgatggacacttggattgattccatatcttggctattgtgactagtcctgcagtaaacatgggagtgcagatatctcttcaatatactgatttgctttcttttgggtgtatacccagcagtgggattgctagatcatatggtagttctagtttcaattttttgagaaacctccatactgttttccacaatggttgtacgaattttcatttccaccaacagtgtacgagggtttccttttctccacatcctccccaaaatttgttattttctgtcttttgataatagccattttaactgaggtgagatgatacctattaatgtggtttcagttgcatttctctgatgcttagtgatgttgagcatttacttatatacctgatggccattagtatgtcttcttttgagaaaatgaaaatctttttcagattatttgccctatttttgttttgttttgtttttgagatggagtcttgctctgtcacccaggctggagtgcagtgggacgtctcggctcactgcaacctctgcctcctggttcacgccattctcctgcctcagcctcccgagtagctgcaactacaggcgaccaccaccacacccggctaattttttgtatttttagtagagatggggtttcaccgtgttagctaggatggtatcgatctcctgacctcgtgatccgcccgcctcagcctcccagagtgctgggattacatgcctgagccaccacacccggcccatttgcccatttttaatcagattgtttccttactattgagttatttgaggttcttatacagtttatatataggtaactaatcctttgtcagatgcaagttcgcaaatattttcccattctgtaggttgtcccttccctgttatttcctttgctgtaaagaagcgtagacgattcttttttttcccctcccccttcccagcttagaagatttctgacaagtgtagtgaaatcaacaactgctctgcaagaatcagattccagggcaggcacagtggcccatgcccataatcccggcactttgggaggccaaggcgggtggagcacctgaggtcaggagttcaagatcaacctggccaacatggtgaaatcccatctctactaaaaatacaaaaaaaaaaaaaattagctgggcacagtggtgaatgcctgtaatcctagccacttgggaagctgaggcaagagaatcgcttgaacccaggaggcagaggttgcagtaagctgagattgtactgtgtctggaattggttccttctggtgggttcctggtctcgctgacttcaagaatgaagctgggaccctcgcagtgagtgttgcagttcttaaagctggtgtgtctggcgtttgttccttcagatgttcacaggtacctggagtttcttccttctggtgggttcgtggtctcactgacttcaggagtaaagtcgcagaccttcgcagtgagtgttacagctcttaaaggtggcacgttgggagttgtttgttcctccggggggttcgtggtattgctgacttgaggagtgaagctgcagaccttcacgctgagtgttacagctcataaaggtagtacagacccaaaaaatgagcaacagcaagatttactgcaaagagcaaaagaacaaagcctccacagcatgtaagagtaccccagcgggttgcccccgctggcgcaggtggccagcttttattcccttatttggccccacccacatcctgctgattggtccattttacagagcgctgattggtccatttttacagagtgctgattggtgcctttacaaacctttagctaacacagagtgctgattggtgtgtttttacagagtgctgattggtgtgtttacaaacctttagctagacacagagcactgattggtgcatttacaatcctttagctagacagaaaagttctccaggtccccacctgattagctagacacagagcgccgattggtgcgtttttacagagtgctgattggtgtgtttacaaacctttagctagtcacagagcgctgattggtgcatttacaatcctttttagctagacagaaaagttctccaagtccccacccgacccagaagcccagctggctttgcctctcagtaccactgctctccagcctgggcgacagagcaagactccgtctcaaaaaaaaaaaaatagcactaaaagaaacttattaaaaaagaaaaacattgtcaggtcaggctaaaggttaaagaggaaaaaaaatcacagggtagggtcaaagagtggcgataacagagaagagagtcatgagacttgaaattaaataatagaaattactcaatattaactgcagagagaaaatagactgaaaaaaattagcagagcctcagtaacctgtgggactgtgatgaaagatttaacatcatgtcatcaaagtccccccaaaaaagagaaaaaagcatgaagctgaaaaatattcaaagatatgatggctcaagattttccaaaaattgcaaaagacatagcctaaaccgaataaactcctaacaagtctgaggcaatctatatcaatatatatatcataatcaaacgcctgaaaactaaaggcaaagaaaaaagtattaaaaacagcaagacagaaattctaccatatttataagggaaaagcaattttttttttttttgagatggagtctcgctcttttgtcaggctggagtgcagtggtgcaatctcggctcactgccacctctgcctcccgagttcaagcgattctcctccctcagcctccagagtagctgggactacaggcgcgcaccaccatgcccagctaatttttgtatttttagtagagacagggtttcactgcgttggccaggatggtctcaatctcttgatctcatgatccgcccacctcggcctcccaaagtgctgggattacaggcgtgagccaccgcgccctgccaggaaaagcaatttttaaatgacggcatatttctcctccgaaatcacagagaccagaaggaagtgacacagtattttccaagtgctgaaagaaaagcagtgtcaatcgagaattctattatccagtgaaaacagccttcaaaaatggaagggatatcagggcaatctcagatgaagaactactaagaatttgtcaccagcagacctaccattaaaaaaatggctaaaggaaattcttgaaatagaaaggaaatgataagtcttagaacatcagggaggaacacagaacaacagaaagagtaaaaatatagataaatacactagacatttcttctgctgagttttcgagagtatctttgtccaagcaaaaattttaacattgtctaacatggttattgaagtatgtagaagaatcattaagataattgtaagtgagagagggtaaaatgacttaaaagaattgtaaggtttctatgcttcagtcaaactggtaaaatgtcaacactagtagactgagatatcaatataatgtaatatgtagagcagctattaaataatttacacaaagagatacacactaaatcactagacatatcaaaatggaattctaaaaaggtgctagtaacccaaaggaaagtacgaaaaagaaaacagagaaaccaagaacagaggaaacaaagataacaaaaaaattctatggaagacctaagacttaatatacaggtaattacattaaatataaacagtctaaatacactaataaaaagatagattagtgagtgaaacaagccaggcacacaaagtcaaatatcacctgttttcactcataagtgggtgctaaaaaatgtgtacacatgaagacagagattggggtgacagacaatgaagacttggaagggtgaaggagtatgagggggtcatatgataggtaattcctaattgggtacaatgcgcattatttgggtaatggataccctaaaagccctgacttgaccactatgtaatctatgcatataacaaaactgcatacggccgggctcagtggctcacgcctgtaatcccagcactttgggaggctgaggtgtgtagatcacttgaggtccagagttcaagaccaggtgggccaacatggtgaaaccccatctctactaaaaatacaaaaattagctgggcatcgtggcaggtggctgtaatcccagctactcaggaggctgaggcaggagaatcacttgaacccaggaggtgaaggttgtagtgagctgagattgctccactgcactccagcctgggtgacagagtgagactccatctctaaataaataaatcagcaggtatttataaacataggccagataatgtcacttctctgctcacaaccttccactggtaccacatctcacagcaaatggaagccaaaggccttacaatattagcaacagccccagctttcaggccacaaaattcatcttgaaactgtagcctactgagtattcttaacgtaaacatttccttaatataaagcagtatatattcgctgtagaaaaactgaaaaatataaaacatgtaaagggggaaattacttataattccacagtctaaaatagccactacactggtttttttaatatatatatctttttgtaaatctagtttttacaatttaatgatactgaggcaaacaaatttgccacatccataaaaattttgaaatcaaatagaaataaaataataaaaagacagattggcagagtaggtgttttttgtttgtttgtttctgtttgtttttttaaaaaatagaaccaacagcaagcatagtggctcacactggacgctgaggtaggagggagcccaggagttggagaccaacttgggcaaccatagcaatgtagcaggacgagccgcagacaaaactcagacaccgagttaaataaggaaggggtttattcggcggggggcattggcaagactcctgtctcaagagcagagctctccgagtgagcaattcctgtaccttttaagcgctcacaactctacgggggtgcgcgtgagagggtcttgatcgattgagcaagcagggggtacgtgactgggggctgcatgcaccggtaattagatgggaacaaaacaggatagggatttccacactgcttttctatacaatgtctgtaatctatagataatataaccgattaggtcaggggtcgatctttaactaccaggcccagggtgtgatgccgggctgtctgcttgtggatttcatttctgccttttagtttttactttttctttctttggaggcagaaattgggcataagacaatatgaggggtggtctcctcccttagcaagacttggtccctacacatttttttttttttttttttttttttttttttgagacggagtctcgctctgtcgcccaggctggagtgcagtggcaccatcccggctcactgcaagctccgcctcctgggttcacgcctttctcctgcctcagcctcccgagtagctgggactacaggcgcccgccaccatgcccggctaattttttgtatttttagtagagacggggtttcactgtgttagccaggatggtctcgatctcctgacctcgtgatctgcccacctcggcctcccaaagtgctgggattacaggcttgagccaccgtgcccggcctgcattttttaagtaaataatttttcctctttaggcctcatctggtttattttttattttttgtaagatttaaactcagacttaaacatttaattttatccatgtgtgcatatgaacctcttccattacttccaacaggtcagcattgtgtaaactacacttcagttataaaccttgttttgagcagccaggttgcagcccatacaatgttcccagtgaggacttcctcctacctatttccctccatctctgagcgagcgtggacttgctgcacgggggggtgcacacttcatgctctatgtgctgagggacttccctccggatccgaccttgttaatatcccagttgtgagtgagagcttctgaagctccacaggttaactggaaattaaattgcagcgttagttgtctcctcagaactcactggtttcatgcctcactcagaagtaactgcacaattccagggcgtccacaggaacctacaggttttgcctacccctgcccgcgactggctgatctccaaaccctctccctggcttcccgctggctgctcctgccactcccgtcgtgttccgccccaagcccctttgctttgctctctgctcctccaggcggttcctcccacacagacgtgctgggctccacaggggcgccttttgcctcaggtggatcagaacatgtgttcgtgtgactctttttttttgttttgttttgtttttgtttttgtttttgttttttgagacaagtctcgctctgtcgcccaggctagagtgcagtggcgcgatctccgctcactgcaagctccgcctcccgggttcacgccattctcctgcctcagcctcccgagtagctgggactacaggcgcccgccaccacgcccggctaattttttgtattttttagtagagacggggtttcaccgtgttagcccggattgtctcgatctcctgacctcgtgatctgcccgcctcggcctcccaaagtgctgggattacaggggtgagccaccgcacctggccaatttttttttttaatttagccaggtgtggtggcagacacctgtagccccagctacttaggaaaatgaggcaggaggattgcttgaggccaggagctcaaggcttcagtgatctgattgtgccactgcactccaggc

SEQ ID NO: 1338 - DNA, 41206 bp, Homo sapiens
ttttgtggaaaataactttattcatgactgtgtttatcacactatcttatggagaagagatgatcaataaatatttgctgaataaatgaatagcagttacaaaacacttgattcatatggaattaatgttggttctcaaagtgaaaaattacaaacagcactgatattcagccagtatacaagtctggtcacagcagttgtataatactgaaataccccctgccactgacctttggcccccagatgcctcccactgccactgctctccccactgggaacccctgaagttcccacaggctcataactaaagggctaatgtcttgcacagcagcgagcacccaggaccgagcagccacatggccgggtctgctggtgaaagcatccattctgactgatcaggacctgaggggcctcatggttacatattttgataatatccctaattataaataaggctcagttatatagtttgaaaacaatgcttctcctcattgcaaaatctcttagaagactccgtagatccaggaacggaaatggaaaatgacagcgtgtcaatctctgaaggttttgggcatttccattagcactccatcttcatgtaaaccagaagatatgcagtttcctgcctagagagaagagaagacacatcagcacagcggcatgaaaccttcatcagaaaacaatgcttcattaatccgtgacaggacaagcgtcagcaaacttccaggcggctggattaggccttcatctatccatcaccttggagaggaacaaaataggtggcctgggaagataagcactatgtttctattagttaatatctaaagcggaggttaacaagctatggacacacaagccaaacccagccctcttggggttttttaaatctactttcaacttttattttagattcagcgggcacatgtgcaggtttgtcacgtggatatgagcatactccccaacagttggcctttcacccctcccctccctccccatccagcagttcccagttgttgccatctttaagtcaatgagtccccatgtttagctcccatttataagagagaacatgcattatgttttgtttggtttttgctggtttttttttttttttttttaatggagtcttgccctgtagcccaggctagagtgcagtggcacaatcttggctcactgcaacctccgcctcccaggttcaaacgattctccctcctcagcctcccgagtggctgggactacaggcgcccgccaccacgcccggctaactttttgtatttttagtagagacagggtttcaccgtgttagccaggatggtctcaatctcctgacctcatgatctgcccacctcagtctcccaaagtgcagggattacaggcgtgagccaccgtgcccagccttttgtttattttttgacgagaccgttcttgctctgtcaccaggctggagtgcactggcacaataatagctcaccacagcctcgtgctcctgggctcaactgaccctcctgcctcagttttagcttcctgagtagctaggactatggatgtgtaccaccatgcctagctataataatttttatttttttgtagagatggagtcttgctttgttgcccaggctggtcttgaactcctggcttgaagtgatcctcctgcctcggcctcccaaattgccgggattaaaggtgggagatcgcacccagtctccaaccctctttttgcaagtaaatgtaactggaccccagccatgctcatctgcccatgtactgtctacggctgcttttgctctacagggcagagttaagtggttgcaacagacaccgcacagaccacaaagtctgaagtactttctctccagccctttacagagaaagtctgccaacctctgatctcaataacagggaaatcaatgacaaccacaaagtgacaaagattgggtgtctaagatggatgttcagaataaacaagagagaaagatgaaaagtagaaggaggatttcaaacgcaagcttcacctaatccattatttttcaaatgaccaggcctatctctgtagctgaaaatcacctcaaataggatctctgatatacagtctccaaaagctcagctaagaaacttacaaagtctctctgccttaacttcatccaccttttttctctccagcttctcctcggtagttaatgattataaaaatatttattggctcatgcctgtaatcccagcactttgagaggccgaggtgggcggatcacgaggtcaggagatcgagaccatcctggctaacacggtgaaaccccatctctactaaaaatacaaaaaattagccaggcgtggtggcgggcgcctgtaatcccagctactcaggaggctgaggcaggagaatggcatgaacccacgaggcagagcttgcaatgagctgagatcctgctactgcactccagcctgggtgacagagcaagactccatctcaaaacaaacaaacaaacaaacaaaaaaacagtgtgatggccaggcgcagtgttcatgcctataatccaagcactttggcaggctgaaatggatggatggcttgagcccagcagtttgagacaagcctggcaacatagcgagacctcatctctacaaacatttttttaaaatatgccaagcatggtgtacagactgtatgcctgtagtcccagctattcaggaggctgaggtgggaggatcacctgtgcccaggagttcaaggctgcagtgagctatgatcacaccacagtgctccagcctgggcaacaaagcaagactccatctctaaaaataaaattaaattaaaaaaaagatcttcgctgtaaaagaggtatgctcaaatgcaataaaagcatataagaaggccaggtgtggtggctcatgcctgtaatcccagcactttgggaggctgaggcaggtggatcatgaggtcaagagactgagaccatcctggccaacatggtgaaacaccgtctctactaaaaatacaaaaaacaatcagctgggcgtggtggcacacacctgtagtcccagctactcaggaggctgaggcaggagaatcgcttgaacctgggaggaggagccaagtgtagtagccaagattgtgccactacactccagcccggcaacagagcgagactccgtcaaaaaaaaaaaaagaaaagaaaagaaaagaaaaccatacaagaagcccctacgaatctgggtgaatcagcaaaggcttcacaggataggaaaaggccatgagtatgaaaacatgagtggggagttggcctagatggtaaacgaggagaggacaatacggccaggaagtgcatgtgcacagcagacgggagatggagggcacggctgattggcagctacctgtactttaatattcctggagtgtgacgtgtgaggcaaacatggggtggtggggtgagtgctggagatgaggcggacagtgagccatcagcatgttagtaacaggggaatccatgggcgtttcatgcagctccaaggaccctatgtgagctcatcagactccaattacccaaatctgtttcttaccagtggtagttaggatttccgtaggtacactggatgtcttcccaggacacctggaagccagaaacaaatggggtcaagcagccagctgacacaagcacccacagaggacaggatgctataatgtgcccctcatcctccagacaagcccacccctagcaactcccaagagcctggagcaacagcagcaggatgtcttgtgcaatgaagtatgtttagtgcccttgtccctgtgtttaaacttggtcatgcttatcccagaggcctaacttacatatttctaacactcgttgctctctagacatttcccacaaagcaggaagctgcagagcatgagcctagagcaccaaaaacttagaagtgaagtgaattgaacccttacagaggtgcaaaccacatggggacttcagaccgaaaaaggcttgaaccctcatcaaaggccccacacccagacagcaggatcacagtgtgtcttgatctcagagacccacgcagccctgagcccagcatttgctagaggtggccaatccagggcaggaggcaattgtggatgatgtttcttaccaagcaaatattggagtcattgaagcagaaccattttccatccacagcattccggatgtagacacagtaatgaccggagtctgccattcccacgtgcgcaatcacagcaaaaagctcatactgccctccagactggaaagagacaggcacgagacagttcacccaccaccacaaacacgactgcctcacacatttatacctgcccacactaggcccgactctgggactttagaatattagaaaacagtcccgacccacagccagtgggcaccctccaggaggggctttcccgagtgtggatcctgaactgcgaaggctcagcagcttggcagggcagagcacgcaagagatggaaggcaggtcatgagagaggcccccaaagccaaggcaagattagaactttcccctgggaggggtggggatcatcagaacacagttctgtttctccacaagcccaggaatgaccctaacctgagccaccgtacccagccaaaaaagtcttttgtagggggaggggagacagagggcaagggcggcagacgcaaagctgagtcacccacagtggaggctgaaattatccctatttccatttgcagactttgtgcagaactttacaaaatgcagggcaatatctgtatctaaatattagtttacaagaaataaaagggttacaggaacatgttaaaagatatcaaccagccagtgctggcatatgaaaaaaatattcaaccaaatcaactgcaaggaaaagaaaaggagcggaaatctaaaaggaactcaagaaaagaaagaaacttaaccaaatgcaagtgtaggcgttgtttggatctagagtcaaacaaaccacatagattacacaacagtcaggaagtctgaacgttgaccagatatttgatgctattaaggaattgcaagatggagatgattatcttttgagtgcttattctttagggatacataatgaagtgtttataaatgaaatagtatgatgtctgggatttgcttcaaaaaaatccagtacagggttgggtgaaacaagagggtgggttataggaaaagcaagacctgccatgagttttggtaactgttacagccaaggattcactgtctaactcttccttcactacacactttggtatctatttgtaatgttccataacaaagtcttttttgttgttgttgcaaagatggagtcttgctttgttgtccagctgggctcgactcctggactccagcaatcctcttggcctcccaaagagctgagattacaggcgtgacccactgcatccagtcaaaaaagtcttttttaagtgaaaaacaattttaaatacacttcattgggcagaatctgcaggtagaaataaaaagaactagaaggaaagaaaaagagaatcctatgaaatgtatacggcctaagtaggtaaagaaatcatgttataataggagctattgtaacatattatcaggtcttaattttctaaatgtcatggttctagagcataaatagccaaacagaccaataaaacagaagagacactccaaaaatagacccgtacatacaggaatacaaaatttgttatgtagcatttcaaatctatggaaaaaaagatatttgtgtcttttttttttagtttttcttgttttgtttttagagacggggtcttgcgctgttgcccaggctggagtacaatgatagatcatagctcactgcagcctcaaactcctgggctcaagtgatcctccaactcagcctcccaagtagctgggactaaaggtttgtgctaccacacccagctaatttttttttttttttttgagagacgggggtctcattatgttgctgaagctggtctcgaactcctgggctcaagcaatcctcctgcctcagccttttgaggtgtgggatcacaggcatgagccacatcacctggccttgtgtctctttttttctcagaatctcttgataagttattatctcaggacaagtgaattaaactttactctgattaaatgtggtccagtcaactggctactttatgattatcctcaaagtgggcacaggccatctgaggaagaaagtttggttggtactatgaacccacaatgacatgtttgcctatgcatttctatgtattccacattatttccaaagaagcctactgaattctggattctgtccctcagtgctgtgaggcatatgaacacaaatccaatatttagaaagaagaaaggcttttgaggctggggacagtctctgaggaacaggtggctcctagcagactgggggtgaaggaagggaaaacagaaaggacatggcatctggggagaggcaggatggcaaggaggtcgggatcatcccacctgctcctcagcatcacaagactctcgcttcattggaaggatctggctgaaatccaagctctgggggaagtacagggagtggcagatctttctcgtctgtgaattcctgatggagaatcgcatgaggtggattgtcagggtctggggcaaatgggtcagcttcaagacctgaaaaatcaaaatcactctggagatgaagtctacttggaatgagagagtcagagaaatgtcagggctagcaacgcgttcttcccaaaaagaggggagcggggcgacatcacggagttcaaggctcctgttcgccgaatctgctgagctcctctgagaataatgcaaaacttggctattctaccaccatgtggccccccacaagaggcacaagggcacagggctctgcacaggtaccaggacccagggagccaccgcgtctgctccagggagctggtctcgcctggagggaaacgccctgccggctgctctcaggcgccctcctgcagtccctctcagtgatgcgacatgagaagccacatccacggctccagatatcagaaccacagcgtcccagatactagccagacccagattccctttctcacccaccatggggtgtcctcggggcctctgatgattctatcaggaaatccacggggggcaaccccagactagtgaaggacagatgacccctgaacagcacgggtttggactgtatgggtccgcttatacacaaattgttgtaaataaatacagtctgccctcccccataggcacgagttccacatctgcaaccaaatgctcatcaaaaataaagtatcccagatgcacaaccgcatagatgagggactgacttttcctatacgtgggttccacagggccgactgggtgtgacttgagtgtgtgtggattttggtaaaagcaggggtcctggaacaaatcccccatatgcaccgagggacagctgagtctgatttagggaatgagtacctgtttcccacgggtcttcttcccacagttctcacagaagcacttgcttttgcttgataactccctgggctggaagaagcagtgcagggcgtcctcctgtcccacccaagagaacagggaaaaagcagcgttggtatttcccacctagaatactatattcatctgttctcacactgctgtgagacaatagctgagactgggtaatttataagaaaagaagtttgattggcccatggttctgcaggccaaccggaagcatggcagcatctgcttctagggaggccgcaggaagctcccaatcatggcggaaggccaagcaggagcaggtgtcttacctgggaggagcaggtgtcttacctgggaggagcaggtgcaagagaccaagtggggagctggagtgcaggggcgcgatctcagttcaccgcaatctccgcctcccgggttcaagcgattctcctgcctcagcctcctaagtagctgggactacaggctgcgccaccacgcccagctaatttttttatgtttttagtagagacagggttttaccatgttggccaggctggtctcaaactcctgacctcaggtgatccacccacctcagcctcccaaagtgctgggattatgggcgtgagttaccacacccagcctggctccacacttttaaacaaccagatctcatgagagctcactgtcacaaagacagcaccacgggggatggtgccaaaccattcacgagaaaccctcccccatgatccaatgtccttccaccaggctttacctccaacactggggattacaattgaacaggagatttttgggcagggacacagtcccaaactgtatcagttacagcctccccacactttgcagctgagggtttcagcttttcttctggttctcctcatatcccccttaatgcctggcctggtgtggtccacttggcaggatctcaaagggcacctactgactggaggaacaaaacaggagggggctcctattaagggagcagtatgagggaagtggaggtaggagggaaaaacatttttgccaaacaaaggagaaattggccagtgccatgaaaatgaaataagtgactttccagaagccagagatagatcaaagaggcaagggggaattggccacactgtgctgtgtggtgtaatggtttgagggtttgtcctccccaaaacccaggttgaaactgaatccccagtgtggctgtatggaaaggtggggactttgagagataattggggagggcaaggtggctcatgcctgtaatcccagggaggctgaggcaggtggatcatgaagtcaggagtttcagaccagcctggccaacatggtgaaaccccatctctactaaaaatacagaaattagctgggcatggtggtgggcacctgtaatcccagctacttgggaggctgaggcaggagaatcacttaacaccagaggcggaggttgcagtgagctgagattgtgccactgcacttcagtctgggcaacagaggaagactctgtctccaaaaaaaaggggggggggaggttattgcatcatgagggcacagccctcataaatgaattaatccactcatggattaatgggttaatcggttatcctgggagtgggactggtggcttcatacgaagaggaagagagatttgagctggcacattagcatgctcagccccctcgccatgtgatgccctgcactgcctcgcctcaggactctgagagttcccaccagcaagcaggccctcaccaggtgcagcccctcaaccttgacttcccagcctccagaactgtaagaaataaattacctagtctcagatattgagttataacaacagaaaatggactaacacatacaggggcagcaaataccaagagaatccccttaccagtgtcttcaggggctttgagtccacatcaaaaagagaaagtgggagggtgagcatgctgctgtttctgctactctccatggcacagtcaacgcaaatcaaggagtccttcacccggatcgtatacagggcctgcagtctctccacctgcaagagggagagcggagaggtgagatgggaacaccaccataagccaggtcaggccaactgccagaaggtggagccaagagacagaagctcctcacaaaggtgcaaaataataccagtaacaatattatgaaactgtgataagtgttttatgtggattaactcttttttcttttttttttttttttttttgagacagagtctcgctctgtcacccaggctggagtgcagtggcgcgatctcggctcactgcaagctccgcttcccgggttcacgccattctcccgcctcagcctcccgagtagctgggactacaggctcccgccaccacgcccagctaattttttggtatttttagtagagacagggtttcactgtgttagccaggatggtctcgatctcctgacctcgtgatccgcctgcctcagcctcccaaagtgctgggattacaggggattaactcttttattcctctacacactacgggaacaacagctgaatgagtgaaatgagcagcatcttaagcttccgagtgctctggttctaggttcttaccaagtgcacatcagtgatctggtccttaatcaggttccagagtttgaggtacagttgggcagcatcatgttggacaaacactggccacagagaaaaggaacagccaattagtgaggtcttcagagtcgcttctcatgccctggtacttagacacacatgaacactcatcactttgtctcttcctagccctccaccccactgcaaggctaagttggcacgacagaagaagtgatcaataaatgaacagtaagtttggtattgatttttgagaacgcctcttaaaacttaagctccagtgccagatgtagtggctcatgcctataatcttaacacttcgggaggccaaggtgggaggatcgcttgaactcaggagtttgagaccagcctgggcaacatagcaagactccgtctcgataaaaaatttaaaaaagtacttgagagtagcggtgcacgcctgtagtcagagctacttgggaggctgaagcaggaggatcactggagcccaggatgttgaggctacagtgagctgtgatgtcaccactgcactcagcctggggaatgagatgtccacagggactttgaaaagcactgatacattcctgaggatctagaaggccaggcgcatgcccaagtaagacctgagagggctcagatccctcccctctggctgacaacaaggccacatgcaagaaagcaatgaaggcgaatacagaatcatgaactgcccagaaacgataaaacagcaacaacaacaaaccctgctgtggggatctctgatgtccagtgttgccaccttacattatctaaaatgttcattttccaacaaaagagacaagacctacaatgaaacagaaaagcatggccacccaggaaaacagcaatcgtagaacctttcactgagaagccctagatgttggcgttactaaacaaagactttagccgttataatatgttcaaagaactaaagaaaaccatgtcaaaagatgtaaaagaaagtgtgaaaatgctgcctcaccaaataaaaagtatcaataaagaaaaaactataaaagaagaaccaagcagaaatcttgagttgaggagaaccataactgaaatgaaaaatgtactagaggaggtcaatagcagattagagctggcaaaagaaagaatccataaacctggagctaggttgattgaggttctccagactgaggacggaaggaaagctgaacacagtacctatgcagcgaaaagctgaggagctgctcactgcgtgtagagctcaactaactctgatacaaaaaaaaatgtgatacaaaaggttttatacacaaatgtgaatttattctgaagccagcctggggcaaggagcaagacacatcctgccttttaatgtgccatttctcctttggaggagagaggggcattttcataaggtgtgttgtgggggtggggggagtgagcaatggcggttttctaccgggcagttatcaagttcccagcagctgagttggcgcctttccgggcagaaaagtggccgagtgggcatgctttctccatgccttcctagtgggtgaaagacaaacccctagagggtggaagtttcgaagccaccccctggcagggagagttccctggtgggtatgctttgggctgcaaatctactgccaagtctcaggaaagatcagctggaagaacttgcccgttctcaatcaaacctccatcagcctacctccatttacagattcttccttttgcccagcagggaatgtctggagaggggtaggcgaaaggtgatatttgcatttctaaagggctaacaggaaacaggaaacacggccgcggtgaggggtgagggatgggaagaggagaagtgaaaagaaagtaataagaaaactaatataactatctcttagaaaatgggagtactcagttacacccagatgggttcactagtgaacgatgggttctaccaaacatttatgggaaaaattataccaattccctacaacctcttccagaggacaaaagcagagagaacacttcctaactcattctctgaggccagcattatcctaacaccaaaaccagacagacattgtaagaaaaaaacctaaaaaccagtatctcccgtgaacataaatgcaaaattcctcaacaaaatattagtgaatcaaattcaactatgtataaaaagaatcacagagggtgacacaagcgagatggtagagaaggaggctcctggtgctccccttctcccatggacacacggtaaaactctcatctacacacagatcaactccctctgaaagaaacccagaaaccagctgagagaggcctgcacagggggcaatggggagaacacccacatcgcaaccggttggaaaagctgagacacactcgcaccacaagccccaccccagacacagtaccttactgtgaggaaggaatccctactcccagctttctcctggagaggggagggtttggaccacacataggcagccccagcttttgcagttcccactcaagggcttggctgctgggtcacctagctctgggagcagacatgggtcagcagttatgaatcctctgcgaccacagagggcaaagaggcagttttaaacgggcacgtgagcacttccagcagctgtgctcagcacagagcaaacaggcagaaatgccaggcttccagtttctccctggaaggatatgtctgcgggctctcctagctgttgcccgagggatgggcttctattaataactggcctgcacctggagccaatgaggcaggtaaacaatagatttccaggagtctggacaggcctgtgggcaagtcccatgccttctcccaccccctgctgtatggtaaaatcaggtctctaacttcacacattgagtacacatttacccctctcaaatgaaggtctagctcctcgaccaccgagctttgggagctgacaaggctctgtatttgtaagtcccacaggggcacagagaccaaagaacatccccccaggcccagtgcagcgtgaacaggcaaaaaggcccggctcctactttctccctagaaggagtttgtctgcacagtgcagctgctgccctggggtttctatgcatctgggagctgacagagcaggaaaccagtgctcctctgagaccctgaacaggcaggtgagcacctccacagctgctcccactggtttgctcaacagatagcgtcaagcttccaactaacctgtccgtctctaagcagagagcagccagcattcgctaggcccctgggggtgacaaagagtaaaacaatgcgtgaaggagtgtgcagtttcaatatgagtgcaggcacttgccacagatcctctgtccagcgttttgcagagcaagtggcggattaactcatgctcccagcttttccctgaggatagaataaactggaacacacatttaatgccccaacgtctccacctgcacctcaaggggctggtttctatctcccctgtctagggcactgacaggacttgacacattctaatctcctgagggccgctaacaacatagatgacagtctggacaacacaaagggtcaacaggtgctccgagtgtccggcagggctaattggtaagttcgtctcttatacaaggcccgtgggacaagactgggagaggtatttttctttttttcttttttctttttttttttctttttttctgagacagagtcttgctctgtggcccaggctggagtgcagtggcgcaatctcggctcactgcaagctccgcctcccgggttcacgccattctccttcctcagcctcccgagtagctgggactacaggcgcccgccaccacgcccagctaattttttgtatttttagtagagacagggtttcaccgtgttagccaggatggtctccatcgcctgacctcatgatctgcccacctcggcctcccaaagtgctgggattacaggcgtgagccaccgcgcccagcctgggagaggtatttttcttaactaaagtacagaaaataacagagaatcaagaacaatgaagaaacagagaaatatgttccaagcaaaagaacaagataaatctccagaaaatgcccctggtgaaatgaagataagtgacttaccttacagacaattcagaataatgatcatgaagatgcttaccatgtctaggacagcaatgcatgaacaaagtaagaatttcagcaaagagacagaaaaaagttcaaaagaaataacagagctgaagaatacaataactgcaataagagctcaaaagagaagctcaacagactaaatcaagcagaagaaaggattagcaaactagaagataggtcactggaaatcattcagaggagcaaaaatgaaaaagaatgaaaaagagtgaagatatcttaagagagttaggggacatcaagccgaccaaaataggcattatcagagtcccagaaggaggagagtgagaagagatggaaagcttatccaaagaaataacagtcacgagttgcagatcaacatttcagtcaatggcagaccacatgagcacagtggccatagcatgcagcctagctgtgtagtaggctgtcccatctaaatttgtgtaagtgcactccatgatgtccacacaatgacaaattcaccttctgatgcattttcagaacgtatccctgttggtaagcaacgcatacctataatgactgaaaacttcccaacccagggaaggaaatacaaatccacatccaggaagcccaaaggacaccaataagactgatctaaagcaacccacatcaagacacatcataatcaatttcaaaagttaaagacaaagaattctgaaagcagcaagagaaaagcaatgtattatacacaagggaaaacccgtaagtgtaggatttcttctgggggtgatgaaaatgttatgaaattagattgtgatgatggaggcacaactctgtgaatacactacaaacctttgaattgtatgtttttaaatggatgaattttacagtatgtgatgcacaacccaatatagctatctaaaaaaaaaaaaaaaaacctaacctatttgtgaattattttgtagaacatgttttctcttttttattcctttattctgttttcctgcagttccctgactgtggtggaataagcttggaggagatgccttcacttactctactgagaggcagagaaaggttaggtatggaagtaaaatgtccataaataatatcaattctgcacctccaaagatgtgtgcctcttacacaaatgtctctataatctgaggggtccaggctacctaacttgcttcttgttgcttcactgcccgttagttcctctcttcactctctaagcttcccatcccctttggatcagcagccaggagcccagtgggagggtatcttacagggcacgttgcacttctgcaggcagtaggccagctccaggggccgcactgctttctgccggctgtcctgcatcttctccagcagcagaagcatctggaaagggacgcttctcctctgctcgtcagctcccctgggcaccgtgatcctgccacacaagaacagccagaaacctccttacatgtagttctcaaagctaggtgcacactggaatcacctgggagaaattttaaatcttcatatccaggccactcccatacaaattaaaccagaattctgggtccggggggcggggcgcgggcagttatcagaatttttcagttcctcagattatttcaatgtgtggtcaaggttgagaagcaccatgtgagtgaatctgctctacaggggaccctctagagagggggatcagcatgactgctgccttggcccctctgcaccctgcccagcaatcgtgctagagcagacggcagatgcacgaggtcctggctccacatctcgggcaagcagcaaaatgtccagcctaaagctctccagactgcagaggcacatgctgggttaggtcctgggaagaaaggcaacatgaaaggctgtccgtgtggtttggcaatgattcatttaatcacaggcatttttcggatgggaaaaaggagagagcacagggcagaaaaggagtgatagagagagacagagggagagagtgcattgtgtgagtgttggtggaaggaggggtgtgtactccccactgacttactccttctccgactttggtctagtcccaactctgtcttttaaccaagtcagtggctgtcaatcctggccgcatttaaaatcacccaaagagggctttaaaaaagtaccaatacctggccgggcgcagtggctcatgcctgtaatcccagaactttgggaagctgaggtgggcaaatcacctgaggtcaggaaattgagaccagcctggccaacatggtgaaaactcatatctactaaacatacaaaaattagccaggtgtggtggcgggcgcctgtaatcccagctacttgagaggctgaggcaggagaatcccttgaacccgggaggcggaggttccagtgagccgagattgcaccgtcgcactccagcctggggacagagtgaggcttcatctcaaaaaaaaaaaaaaaaaaaaagtaccaatacttgggtcgcaccccagaccaacctaagaagttttagaaataatgtgtaggccagaatatgcagaagccaatctttcctctgccagcttttgagagaagatctcaaaaagtccaagtcactgtgaataactgaatatattaaaaatgaaataatacaggccaggtgcagtggcttacgcctataattccagcactttgggaagctgaggtgggtggatcacgaggtcaggagatcgagaccttcctggctaacacggtgaaaccccgtctctactaaaaatacaaaaaaaattagccaggcatggtggcgggctagtcccagctactcgggagactgaagcaggagaatcgcttgaacccgggaggcagaacttgcagtgagccaagatcatgccactgcactccagcctgggcaacagagcaagactccatctcaaaaaaaggaaaaagaaataatacaaatgctcatcagcctgaagaacagtcttacctcttcaatatcctggtgaagtccacattcattacgaacacctgaatcaaggagttaaggcagcaggtctgtccaatgttgtgtaaaccaaccaggcctataaggggaagagaaaaaaatgctgagggcaaggcctagggtaaagaagttgacaaggctgggcatggtggctcatgcctgtaattccagtactttgggaggccgaggtgggcggatcacctgaggtcgggagttcgagaccagcctggccaacatggtaaaaccatgtctctacaaaaaaaatccaaaaatcagccgggtgcggtggctcacgcctgtaatcccagtactttgggaggccgaggcgggcagatcacgaggtcaggagatcgagaccatcctggctaacacggtgaaaccccgtctctactaaaaatgcaaaaaaaattagccgggcgtggtggtgggcgcctgtagtcccagctactcaggaggctgaggcaggagaatggtgtgaacccaggaggcggagcttgcagtgagccaagatcacgccactgcactccagcctgggcaacagagcgagactccatctcaaaaaaaaaaaaaaaaaaaaatccaaaaatcagccaggtgtcatgacaggtgcctgtagtcccagctccttgggaggctgaggcaggagaattgcttgaacccaggaggcagaggttgcagtgagccaagatcatgccactgcactccagcctgggcaacaagagtggaattctgtctcaaaaaaaaaaaaaaagttgacaaaaatctaatgtttttcttaaagctactaaggacatgaagtcctgtaaagtctctcaagtacgaagtgttcattcagcttgcaaacaaatcggagagaagatatcaaacatgaatctttaaaaagctctatcacaagggccaagcacagtggctcacacctgtaatcccagcactttgggaggccgaggcgggaagaccacctgaggtcaggagttcaataccagcctggcctacatggtaaaacctcatatttactaaaaatacaaaaattagccgggtgtggtggtgcatgcctgtaatcccagctactcgggaggctgaggaaggagaactgcttgaacctggcaggcagatgttgcagtgagccaagatcgtgccactgcactccagcctaggcgacaaagcaaaactccatctcacacacacacacacaaaaagttcgataacaagaaaagttttaatatagtccattaggaaaagtgagatgtcaccaaaagtatatattactcactgccaaatgagtagtatgagcaattgttgggagagaaaaaaaaacattagagaaagcataactgagaatatggcttcctttcattcaaatcgttctccacggagctaagtccaaatgtgcatctgtggggctcagggataagagggactccccagtatgtctatgttggagtccagcggagaggtctctgcccagttcccactacagggaggcaggaaataaatcagaaggttactttggggaagattcacctaatccagtgtcaccctgagaggctgaaaggcagaaggaacttataagaatacgagaaaaacaaaagataacatttgtctgacccctagcaaccaacctcctcttttccaacccaaccttaggctcagcagaccccacaagggaagtaccactaatctcaggattcttggggaaagggctttggcttacaagataggacagtaagaaagtaacaacctggggtcacaggtgagcacagatttctactcccagactatcaggagcacattgcttccagacagacccatacaaaggtagcagtaaagatgggaactaatgctaagtgcctctagaatcccagcactggcttaaagcagtttccacagatgaccccatttaatcctcccaacaaccctatgtgcttggtactattattacccccatttgtttgtttgtttgtttgagacagagtctcactctgtcacccaggctggagtgcagtggcgtgatctcagctcactgcaacctctgccgcccaggttcaagcaattctcctgcctcagccacctaagtagctgggattacaggcacctgccactgcgcccagctaatttttgtatttttagtagagacggggtttcaccattttggccaggctggtcttaaactcccgacctcatgatccacttgccacggcctcccaaactgctgggattacaggcatgagccaccgcgcccgaccttgtttttgttttttacagatagggtttcactatggcccaggctgtatccccatctaaaagatgcagaaactcaggcacaggaaagcatgagccgtcgaatacaaagctctgcggcttcagagcggagggggtgagccgaacatttacatgcagtcaagaagaggaaaacgggaggggtctaatgaccatgagggtagtcccaggccctgggacgctctctgggctgctctctcttcatgttgctgtcttcttccttcttttcttcaagatctgccggggactgcgaggactcagccaggatggactgacagatttgcctcaggagcccaaacgccttgctcattcgtgatcactccaaaacccccaggccgcagctgcctggcccgcgttcaggacagcacgacttcacttccaggaagcgcttatgtgagccaggcacgatggaatctctgtgaaaatacaatgcgggtaggcaagaattagagaaggaggaatgtgtattcatgtaatccgttctgatgccaaagagcaggtcttagagggagataaatgtttggggagactgactcatagagctctaggctggaaatgacagctaggctacacatcccctaacctgggtcccaggcgtttccattcatcctcagagccgactgccaaatcctaaccgggagcgccctcttgggaaaggacagggaagcgcgcataggactttgctttacaacccaggaccaggcccacttcagtaaaaagccagcactaagcaagaactctcagcccctgatgccaggctggcatacaggggaagcctctcaacccgcccaacacccaaggggacctgcggccctggcagaacagcctcgtgttctggcccgcaacactgccggccagctgcagcagtcagataaaccttagctgcaggcaggctgtagctacctgtcggccttaggcacatcctggtgctgggctggtctcatggcatgaattctgggggtgtgactcaatattgtctcagcctcagtggccataggggtacccgtgtaccctcccccaacccagcacagctgtgtgaagagagacactgtttgcttgggggaagaagaggtaagtggagtacttcgccttggaacccagtgtgtccggaattggtgggtgcttggtctcactgacttcaagaatgaagccgtggaccctcgcagtgagtgttacagttcttaaagggggcatgtccgcagtttattccttctgatgttcggatgtgttcggagtttcttccttctggtgggtttgtggtctcgctagctcaggagtgaagctgcagaccttcgcggtgagtgttacagctcctaatacggcgcatctggagatgtccgttcctcccggtgggttcgtggtgtcgctggcttcaggagcgaagctgcggaccttcacggtgagtgttacagctcttaaggcagcgcgtctggagttgttagtccctcctggttggtttgtggtcttgctggcttcaggagtgaagctacagaccttcgcggtgagtgttacagttcataaaggcagtgtggacccaaagagtgagcagtagcaagacttactgcaaagaatgaaacaacaaagcttccacagcatggaaggaaacctgaccaggttgccactgctggctcgggcagcctgcttttattctcttatctggccccacccacatcctgctgattggtccattttatagacagccaattggtctgttttacagagagctgattggtccgttttgacagggtgctgatgggtgtgtttacaatccctgagctagacacaaaacgtctccacgtccccactagattagctagatacagagtgtggacacaaaggttctccaagtccccaccagagtagctagattcagagggtcgactggtgcattcacaaaccctgagctagacacagggtgctgattggtgtgtttacaaaccttgagctagatacagagtgccgattggtatatttacaatcccttagctagacataaagattctccaagtccccaccagactcaggagcccagctggcttcacccagtggatcccacacctgggccgcaggtggagctgcctgccagtcccgcgccgtgcgcccgcactcctcagcccttgggtggtcggtgggactcggcggcgtggagccgggagcggcgctggtcggggaggcttggtccgcacaggagcccatggctgcggggtggggaggctcaggcatggcgggctacaggtcccgagccctgccctgccaggaggcagctaaggcccggcgagaaatcgagcacagcagctgctggcccaagtgctaagccccttactgcctggggcttgcaggccggccggctggccgctccgagtgcgggcccgccgagcccacgcccactcggaactcgcgctggcccacaagcaccgcgtgcagccccagttcccgcccctgcctctccctccacacctccccgcaagctaagggagcccactccagcctcggccagcccaggaaggggctcccacagtgcagcggtgggctgaagggctcctcaagcgtggccagagtgggcgccaaggccgaggaggcaccgagagcgagcgagggctgtgatggctgccagcacgctgtcacctgtcaccaggactaggctcactacagtaaaacccagtactgggcagagcctcatcaccctgatactagaccagtacccacaggcagatctcaccccaccctagtgccagatgagaacccacagccccagtaacagggactggcgatctggcccacatcactacctgacaactacagtggccctgggccctgaataacttcagcagcagcaagcacgccatcacagctgtgggtcttgggcgtgccccagtgctgtgccagtctcggcagctatggccttcaggcataacccagggctgtgtcagcctcagtggccaaagaattccaaccacagtgatgctgggcttagagcaccccccagcactacaacagctgaagcagtcatgggcttagggtcctgaccaatcagcctctccctaatctcctatgggtttcctgatgaaagacgagcccaaacaaagccaggcaatgaagactggcttaggtacctatgtcaatgcacagacattgacacacagccataaggatcaaggtcaatcagagaaacatgacatcaccaaatgaacaaattaaggtgccagtgactaaccctaaagatatagagatgaggcctggcatggtggctcaggcctgtaatcccagcagtttgggaggctgaggtgggaggatcacttgagcccaggagttcaagactagcccgggcaacatactgagaccccatctctaaaaaaaaatttagatggtcatagtggtgcacgcctgtggccccaaatactgagaagggtgaaggaggaggatcacttgaggccaggagtttgaggctgcactgaactatgattgtgccactacactccagcctgggcaacaaatgagaccttgtatctaaataaataaataagatgaaataaaataataataatgggtaacatcgaagcactatttcttataaaaggtgaaagccttttatatgtactgtcttatttatccttacacagccatgtgaattaattactgttatatttccatttgacagatgagaaaactgagatacaaagaagtaagtgcctttcccactggcaagtgatgggccagatgtagacaagctggacggggtttaagtccagctaacatgctgctcagagtgaggaataaactcaaccaaatcattggtgggaatgtaaattagtagagccattatggaaaacagtatggagattccttaaaaacctaaaaatagatataccacatgatctagtaatgccactgctgaatatatatccaaaggaaagggaatcagtatgttgaagagatatttgcactctcatgtttactgcagcactgctcataatacccgagatacggaatcaacctaagtgtctatcaaaagaggaatggataaagaacatgtggactatatacacaaaatgggatgttattcagccattacaagagaatgaaatcctgtaattcccatcaacatggatgagcctggagtacattacgttaagtggaataacctaggcacagaaagataaataccacatgttcacactcatatgtgaaagctcaaaaagcttatctcctagaaatagagaatagaaagccaggcatggcagttcacacctgcaatcccagcactttggttggctgaggcaagaggatagcttgaagccaggagttcaagaccagtctaggcaacatagcatgttgcctaaataaaataaaaaatattttattttctaaaaataaaaataaaattagcctagcatggtggcatgtacttgtggtcccagctacttgggagactgaggcaggagaatcagttgagcccaggaatttgaggccacagtgagttatgatcgtgccacggcactccagcctgggcaacagggcaagaccctgtctccttttttttttttgagatggaatttcactctttttacccaggctggagtgcagtggtacaatctcagctcactgcaacctctgcctcccgagttcaagcacttcccctgccttagtgtcccaaatagttggaactacaggcatgtgccaccacgcatggctaatttttgtatttttagtagagacggggtttcaccatgttggccaggctggtcttgaactcctgacctcaggtgatccacccatctcggcctcccaaagtgctgggattacaggcatgagccaccgcgcccagcctggaatatattcttaaattcatgttggatggctcagataacaacaacctctttttcttagtaaatattgactttcaatagttataaacagttgttcttcttacaaggcccagcctaggaggactcaactgaaatgatgacagcagacaattccatcagcaagaaagaggattttgagctcatcattgagggaaagctgatgaaagagagcagagaggttccaggctgcattttccaagatgttgtcctcttctccgccaagacctcccagatacttcagtaggatatagcagtaaaacctcatggagcagatcatttgagcaggctcggtcccaaagggaaacaaaatacagcagcctttcagggtagatcacactggggagacagggaggcggggcagcaaggaaaggaaagtgaagcttaaaaggtctaaggaggatggggagggcaaggcgagcagagagaccgcagctgaagttagcaggggcaataagcatccaccagagaaaacagcctgggcggattccaaggaaggggattttcaaactcaactgctgactcaaaaaaagacccccaggccaggcgcggggtctttgtttgagactctgtctcaaacaaaacaaaacaaaaatcccaaatactaaactaacttagctcccaccctacctgaatttttttttttttttttggttcacgttctctcatgatcttcccgaaatgttatccttaagcttcggggagaggtgagcaacggaaggaactggcccaggcccaccactaaagaagccccaggaccaatcggggtcctcagagaagccccagaagagccaggaacaagctgcagaaaacctggggagggtggggcctccacccaatactccactcacaactggactctctgccaggaaagccaactccaacatttagatgccctaaaaggaacaaaattaacctgccaggaacatgattcaagcagcctcggtgtcttccgacccaccccatcatggcaaccacaattgtagaccgcagtctcgatgacgtgttcacattattttgcatttcttttttctttttttatttttatttttatttttgagacggagtctccctctgtcgcccaggctggagtgcagtggccggatcttggctcactgcaagctccgcctcccaggttcacgccattctcctgcctcagcctcccgagtagttgggactacaggcgcctgccgccacgcccagctaatattttttatttttagtagatgggtttgcaccgtgttagctaggatggtcttgatctcctgacctcgtgatccacctgcctcggcctcccaaattgctgggattacaggcgtgagccaccgcgcccggcctattttgcatttcttgagtaatcgtaatatgcgggttagaacacacggattacaacactttggatgaaaaaccacataatagggaaattttgggactactctctctcaaaaaaaaaaacagctcgtggaaaaactaggacttaccttctttgaaactatgtttatgttaagcattttcccctttgtaagctcatcattgtgtaaaagtgtcagaactgtgcaacacattttttaacagtccaaaagcaagttctttgataaatcaatatgaagccgtgcacctgtgttactctccctcccgttttgttcctgcgaacacatcggtaacctgcattcactctccatccaactctgttcaataccagaaagaaacttcagatgaaatgcttttcagtatttgccttgttttctggaacaactttaaagtacaaattatacctaaataagtacaaattaaagcctctgctttaattttcaaacactttgaacccagattttcaggggtctcaaaatggagttttgtgtttaaaagtctaaatttagctttcttccaaggaaaagggtgtgaagaagagaggttaagactaaaatactctgatttgcagagtttgacaacatccttccaatttctcaatatgaatgcccactgacccagccattccacttctaggaattttccaccgatatatttgtatgaatgtatacataaaattatattcattgccgtatctgtgccagtaaaaactggaaacaacctaaatctccatgcattgtttaaacaatgtacttcccataccatgtatcaggtttttttgtttgtttgtttgagacagtttcgctctgtcgcccaggctggagtgcaacggtgcgatctcggctcaccgcaacctccgctcccgggttcaagcgattctcctgcctcagcctcccgagtagctgggattacaggcatgcgccaccacgccaggctaattttgtatttttagtagagacggggtttctccatgtctgtaactcctgacctcaggtgatcctccctcctcgatctcccaaagtgctgggattacaggcgtgagccaccgtacccggccgaatcagttttttgttttatttttaatgccattaacacatctatatgtcctgccatgaaaagatgtccataatatactcagtggacaaagcaagttcgaaatgattttaaagacttgtacatagaaacatttctgataaggtacaaacaaaaatgatactgagtggaagactgcgagacacatttgtctgcattgtttgaatttttttacaagcttacaacacttctgcaatttctttttttgttttaattaaacacaaagtcatgtcaaaagtccaaataactatattagcttagaaaaaaattcactggcccaaaatatatgcacgtagtaaatacagatcactatcataatttgcagagcacaattattacttaattccttaattatctgactggcataggagcagagttggatgtctgtgctagaaagaaaacttccaaaatgagccccgaacttgcctcaagcgccatgcaagcgtccagcctccgctgctgagttccacgtcgggactgagccggggaccgagctgggaccgaagttccgctccgggcccgccttggtctggccccgcgctcgtggcaccccgcccagctttcgttttccactgaatggaaagcgaaacttacagcggcctccgcgccgggagctgggcgccagcgtgcggggaaaccctgccggcccgagcttcccgcggctgccgttgcagccgcgcacctgctccagacttccagccctcgctttttttttttttttttttttttgagacggagtctcattctgtcgtccaggctggagtgcggttgcgctgtctcggttcactgcaaactccgcctcctgggttcaagcgattctcctgcctcaggctccggagtagctgggattacaggcatgcgccaccactcctggctaatttttgtattttagtagcgatggggttccgccatgctggccaggctggtctcaggtgatccgcccgcctcctaaagtgctgggattacaggtgtgggccaccgcgcccgacctacaggcgcctttttatttgcgattttaaggtccttgcaattagcctacgtgttagagtcatttggcgtttggtagtatccatggcagcattttttctttcttaatgctattgtatttcttggatcgggtgtcttcacatcaccggcctgtggcttggatgcggcacatggtgtaattaggagctcccctgtgggcatgcagatacagatatttctccacttaagaaggggtcagggggcgcggtggctcacacctgtaatcccagcactttgggatgctgaggcaggcggatcacctgaggtcaggagttcgagaccagcctgaccaacatagtgaaaccccatctctactaaaagtacaaaaattagctcggcgtggtggcgcttaatcccagctacttaagaggctgaggcaggagaataacttgaacccaagaagcggaggttgcagtgagcagagatcgacaagagcaagactccgtctaaaaaaaaaaaaaaaaaatggggtcaagtcccagtgaacccatcatgaagtcgaaacatcgtaagtgaaaccacggtaagtgatggaccatctgtgtatatataaggttaagagatctgtaacatgcacaccggaaaggcttattacctctttagagatgtatttcttgtatgtagactcatgggggtaggggcagaagggttatctgctaggggcctcaaactccagccgctggaatttgcgcaggaaagcagggtacaattcccccaaagcgatcattctttctgaaagccgtccccgcagcaacagacaaatagcctccaaaaacccaaagctgccagaacctcactgaagcgttggtagggtctgcagtaaggtacaaaataccatggcatgaagatgtataaacgtgtccataatagggtggatgtgtgttagaagcatgagcacagatatacacatacaggctatccacacgtccatcgtcagcccagactccgcttacattgctgctggaacggaggcagtgtcgcccacagtgcagcatgttctccctggaaggctggtggactttgcgcagtatggtgtttacacaggtacacggtggtgggcgcagggtccgtcctcattatatttgctgaccaatcagttatataaccagcttcatacatctggtaagtcttgtccacaaacaggaacctcaaaaactcaagtgagggcaatgaggagaggaggttgcaaaatttgataaaatatgctaaatacagcaagtcagtagaaggctaaggagcaagctgcagttgcttgcagcaactatcagcagaaaactattaatagtcaatccaatgattctatctgaatcttggtaggtcggtggagcaaagtaattggtgttgctgccccagtgcagaatggacaagggtgaaccttgggttggaggctggactatataatgtaaggatccattacacttctatggggctcttccttccgtccttcatggtaccctcctgaacaattccgtgctaaggccatcaggtgtgtcaagcaaagtgggcgtttgtgtagtatgttccacagtggcccaagcagggtgctggactggagcaggttgaggagggtggcagcacagtggggctgcccagcacaatgtcagacacaaatgggtgctggtgcagcccggcccagggtcacagcccaagcaatttgaagatgtggcacatcccggtattggagtggcccagtgtgtggtgtccagggagggcagggtgctggtggagatgacagattagttacatacagggggatgaccaggtaactgaatgtattaaggataattggagccagagttgaaactctcagagataggagttacaaataaggaaagggagaatgagcccactagtgttgaactggaattggacttagcagtgtggatccatgattttcagtatgtatacacagatagataaagaagtacaaggcgggtggatcacgaggtcaggagattgagaccaccgtggctaacacggtgaaaccccgtctttactaaaaatacaaaaaattagctgggtgtggtggcacacgcctgtagtcccagctactcggaaggctgaggcaggataatcatttgaacccgggaggcagaggttgcagtgagccaagattgcatcattgcactccagcctggcgacacagcgagatcccctatccaaaaaaaaaaaaaaaaaaaaaaaaaaaaagaagtacatgtggaggtaaacatgtgtatacatgcatacatcccctgacttggtctgtagggggcctgggaacagtgacaccccaacagtacatcttgcacccagatcttggtttctaattcccattctctagtaaaaggaaccaatgttgcttggagaaatggctgtttctggggttaaggcagagaaagtacaagatgagcctaggacatcttgttctgccagcaagtaagggaatgctccaagaatgatggggatgtttcaaaacgatgcagaagccagctccaagaccatgctcccactggccaaatttggaacaacttgagcattaaaagaaatgatgatttgttttgttttgtttttgtttttgagacggagtctcgctctgttgcccaggctggagtgcagtggcactatcttggctcactgcaagctccgcctcctgggttcacaccattctcctgcctcagcctcccgagtagctgggactacaggcacccgccaccacgcccagctaattttttgtatttttagtagagacggggtttcaccgtgttagccaggatggtctcgatctcctgaccttgtgatcctcctgcctcggcctcccaaagtgctgggattacaggcatgagccaccgcgcctggcctgaaatgatgatagtaacatttcgacctgttaaataaaatgggaagccacacttcataccaataaaagtagatactgaataaattaaaagtttgatgagaaacaggatatttacacagtttcaaagtactctcccacaaaatacatattattaattaccattattacatacatgtgatacaggttcattctgcccgcatgccataaatccatcactgtgacaggttttgtaaaagagaaaagatttattcgcaaggcagcccagtgaggaggcaggagaacagctctcaaatcttcctccccaaagataagtcttagggatatttaccggtgagagaagcagggtggtgtaaggtatgggcaaaggtgattggcagtgggggaaaatgaggcagtcggtgaccactgcaagcatagtcagggttcgtggcacttcacagggcacatgttcaaaaaatgacagccttagcgtgatctgagggtgtcgcttggggcctctgatgtcaaaaggccacttcttttgtttgcacaagcctacttgaaagctcacggtctcaactggtttgaactaggcaggagctgccccaagttcctgaaaaacaatttgaacgatcatgacagtagtgacatacatgttatctgtaaggaagccggcaaggttaagttacagcgctcagtggcgcggccttcagcttcacagaaaaaaaataacaaaagcaagtgacccaaagcaagcagggcaggctaaattgggcagacctaatcagatgaaccccatggtctcatatgtaatattacattataactataaagaatgtaattaatgtaaatattcggtacaagaaagtcatcagtgcggggaacactggaattgcgtgccaccagaggacagagtggagccagcgcggtatcacttctgtgctgttcccatcgaaggtcagtaaccggaaccccttcgccaggacgcgggtcctggccaacccaaatcgaggggcattctgcagatcagctggtctgccatcttcaaacgattcatgaaaatcaaagacagctttgaggaacggctccagactggcagagaccaaagaggtcatagatgaacaggagatccccaactggatcctttggctgtaaaggacaatattggcacaacgggtgaagcttgaatggggtctgaggattaggtggtagtaacttcacaggcggggatttgggagaaatgcaatgtcacgtggaaaactgactctcaaatagttcaagaaggaagttctttggactatacttgcaacttttctgtaggcttaatactgtttcacaattttaaaatgtaaaataatagtaccaggtagtagttttttattaagacagattgtgctttttgaaagcattggtggaaagatttctcaaaatcatgcgcgaaagagtttataatgaaattgtgtaatatttgtttcaaaagaaagtgtgggccctgagaagcattttctgtagtttacacagtatttctgccaatttgggatactttcagtgtccctggaattctcatcatctgaatttcttactctttttccctttaaaaaaaaataaaataaagaagtatgaggcaaaaggccacacctacctacctcactttaaaattctgtctaaaaacctggtcacagaggaagatgttggctaactttaatgcgataatctagttcccctcaaaatggaaagctatttagaaaaaagctatttgcccaacgtgaggaacaatttatagaaactgacaagaatttttgtcctggggaaaggacagggtttgttgcatgggataaggggaagtgatgtggccgggcatgatggctcacgcctgtaatcccagcactttgggaggccgaggcaggtggatcgtgaggtcaagagatcgagaccatcctggccaacatagtgaaacctcgtctctactaaaaatacaaaaattagctagatatggtggtgtgtgcacctgtagaaccagctactcgggaggctgaggcaggagaatcgcttgaacctgggaggcggaggttgcagtgaaccgagatcgctccactgctctccagtctggcgacagagcaagagtctgtctcaaaaaaaaaaaagcaagtgattttttttaaaaaaagaaaacagaaccgatgtctgaaaaagtagtactcctttacaaaacacattctctacaaacgcgtggtttcatgtgacctctgctcagtccctttccacaactttctcctgcctattttcttctctgcattttgtcaggatgctttttattgtaaattttactgtgttttgcatgcttccaaatataaaaaataatttttaagatgaattaaacattgaacctccctctcagtattgttttgggaacatgcattctcctgaggagagggagctgttgagtggaagcagtcaaacagaactccacatttcattttcctggcatgggtttcagggtgcaactcaaacagaatgtgacttggcatctgtcacctttcccaggcactccctatcctctggcaatttgttgccttaatggagaaccattcaaaattaaatattttatattagaaaagaaatgttaaacataaagaaaagttatacaaatattataacaacctagtgagccttccttcactaattttctctctcatacacacacatctatgtgtatgtgtgagtacacagtatatatgtgtatatatttacacaatcactttttttcttttgctggactacttgagagtaaattgaagagattgacattcttcagctctaaataattcaatatgaacctcataggatcaaagatgttttcatacataaccccagtgcaattattaccaaattcagataatttcatatccgtacaattttcccatatataatatattcaatatttaaattttgacagttatcccagtattgtttatacagcaactgttttcctttgtttcttatttttatagatacatagtaattgtacatatttatgtgttacatgtgatactttgatacatgcatacaatgtgcaatgatcaaatcagggtaatgaaggtattcatcacctcaaacgtttattatttctttgtactgggaacattccaaatcttctcttctagctattttgaaatatacaataaattattgttaactattatcactgtacagtactatcattccctctatctaactatctttgtacccataaccaacacttttcatccttccctccctcctattgcttgccagcctctggtagtcatcattctactctccacctccctgaaatcaacgtttttagctcccacataggagtgagaaggtgggatatgtatctttctgtgcctagcttatttcacttaacgtaatgtcctctggtttcatccatgttgctacaaccgacgggatttcattctttttatgactaaatagtattccactgtgtatatgtagtacatttttttttttttgagacaaagtctcgctctgtcacccaggctggagtgcagtagcgtgatcttggctcactgcaagctccgcctcccgggttcacgccattctcctgcctcagcctcccgagtagctgggactacaggcacccgccaccacgcccggctaattttttgtatttttagtagagacaggttttcaccgtgttagccaggatggtctcgatctcctgacctcatgattcgcctgcctcggcctcccaaagtgctgggattacaggcgtgagccaccgcgcccggccttatctagcatgttttttatccattcatctgttgatggacacttggattgattccatatcttggctattgtgactagtcctgcagtaaacatgggagtgcagatatctcttcaatatactgatttgctttcttttgggtgtatacccagcagtgggattgctagatcatatggtagttctagtttcaattttttgagaaacctccatactgttttccacaatggttgtacgaattttcatttccaccaacagtgtacgagggtttccttttctccacatcctccccaaaatttgttattttctgtcttttgataatagccattttaactgaggtgagatgatacctattaatgtggtttcagttgcatttctctgatgcttagtgatgttgagcatttacttatatacctgatggccattagtatgtcttcttttgagaaaatgaaaatctttttcagattatttgccctatttttgttttgttttgtttttgagatggagtcttgctctgtcacccaggctggagtgcagtgggacgtctcggctcactgcaacctctgcctcctggttcacgccattctcctgcctcagcctcccgagtagctgcaactacaggcgaccaccaccacacccggctaattttttgtatttttagtagagatggggtttcaccgtgttagctaggatggtatcgatctcctgacctcgtgatccgcccgcctcagcctcccagagtgctgggattacatgcctgagccaccacacccggcccatttgcccatttttaatcagattgtttccttactattgagttatttgaggttcttatacagtttatatataggtaactaatcctttgtcagatgcaagttcgcaaatattttcccattctgtaggttgtcccttccctgttatttcctttgctgtaaagaagcgtagacgattcttttttttcccctcccccttcccagcttagaagatttctgacaagtgtagtgaaatcaacaactgctctgcaagaatcagattccagggcaggcacagtggcccatgcccataatcccggcactttgggaggccaaggcgggtggagcacctgaggtcaggagttcaagatcaacctggccaacatggtgaaatcccatctctactaaaaatacaaaaaaaaaaaaaattagctgggcacagtggtgaatgcctgtaatcctagccacttgggaagctgaggcaagagaatcgcttgaacccaggaggcagaggttgcagtaagctgagattgtactgtgtctggaattggttccttctggtgggttcctggtctcgctgacttcaagaatgaagctgggaccctcgcagtgagtgttgcagttcttaaagctggtgtgtctggcgtttgttccttcagatgttcacaggtacctggagtttcttccttctggtgggttcgtggtctcactgacttcaggagtaaagtcgcagaccttcgcagtgagtgttacagctcttaaaggtggcacgttgggagttgtttgttcctccggggggttcgtggtattgctgacttgaggagtgaagctgcagaccttcacgctgagtgttacagctcataaaggtagtacagacccaaaaaatgagcaacagcaagatttactgcaaagagcaaaagaacaaagcctccacagcatgtaagagtaccccagcgggttgcccccgctggcgcaggtggccagcttttattcccttatttggccccacccacatcctgctgattggtccattttacagagcgctgattggtccatttttacagagtgctgattggtgcctttacaaacctttagctaacacagagtgctgattggtgtgtttttacagagtgctgattggtgtgtttacaaacctttagctagacacagagcactgattggtgcatttacaatcctttagctagacagaaaagttctccaggtccccacctgattagctagacacagagcgccgattggtgcgtttttacagagtgctgattggtgtgtttacaaacctttagctagtcacagagcgctgattggtgcatttacaatcctttttagctagacagaaaagttctccaagtccccacccgacccagaagcccagctggctttgcctctcagtaccactgctctccagcctgggcgacagagcaagactccgtctcaaaaaaaaaaaaatagcactaaaagaaacttattaaaaaagaaaaacattgtcaggtcaggctaaaggttaaagaggaaaaaaaatcacagggtagggtcaaagagtggcgataacagagaagagagtcatgagacttgaaattaaataatagaaattactcaatattaactgcagagagaaaatagactgaaaaaaattagcagagcctcagtaacctgtgggactgtgatgaaagatttaacatcatgtcatcaaagtccccccaaaaaagagaaaaaagcatgaagctgaaaaatattcaaagatatgatggctcaagattttccaaaaattgcaaaagacatagcctaaaccgaataaactcctaacaagtctgaggcaatctatatcaatatatatatcataatcaaacgcctgaaaactaaaggcaaagaaaaaagtattaaaaacagcaagacagaaattctaccatatttataagggaaaagcaattttttttttttttgagatggagtctcgctcttttgtcaggctggagtgcagtggtgcaatctcggctcactgccacctctgcctcccgagttcaagcgattctcctccctcagcctccagagtagctgggactacaggcgcgcaccaccatgcccagctaatttttgtatttttagtagagacagggtttcactgcgttggccaggatggtctcaatctcttgatctcatgatccgcccacctcggcctcccaaagtgctgggattacaggcgtgagccaccgcgccctgccaggaaaagcaatttttaaatgacggcatatttctcctccgaaatcacagagaccagaaggaagtgacacagtattttccaagtgctgaaagaaaagcagtgtcaatcgagaattctattatccagtgaaaacagccttcaaaaatggaagggatatcagggcaatctcagatgaagaactactaagaatttgtcaccagcagacctaccattaaaaaaatggctaaaggaaattcttgaaatagaaaggaaatgataagtcttagaacatcagggaggaacacagaacaacagaaagagtaaaaatatagataaatacactagacatttcttctgctgagttttcgagagtatctttgtccaagcaaaaattttaacattgtctaacatggttattgaagtatgtagaagaatcattaagataattgtaagtgagagagggtaaaatgacttaaaagaattgtaaggtttctatgcttcagtcaaactggtaaaatgtcaacactagtagactgagatatcaatataatgtaatatgtagagcagctattaaataatttacacaaagagatacacactaaatcactagacatatcaaaatggaattctaaaaaggtgctagtaaccccaaggaaagtacgaaaaagaaaacagagaaaccaagaacagaggaaacaaagataacaaaaaaattctatggaagacctaagacttaatatacaggtaattacattaaatataaacagtctaaatacactaataaaaagatagattagtgagtgaaacaagccaggcacacaaagtcaaatatcacctgttttcactcataagtgggtgctaaaaaatgtgtacacatgaagacagagattggggtgacagacaatgaagacttggaagggtgaaggagtatgagggggtcatatgataggtaattcctaattgggtacaatgcgcattatttgggtaatggataccctaaaagccctgacttgaccactatgtaatctatgcatataacaaaactgcatacggccgggctcagtggctcacgcctgtaatcccagcactttgggaggctgaggtgtgtagatcacttgaggtccagagttcaagaccaggtgggccaacatggtgaaaccccatctctactaaaaatacaaaaattagctgggcatcgtggcaggtggctgtaatcccagctactcaggaggctgaggcaggagaatcacttgaacccaggaggtgaaggttgtagtgagctgagattgctccactgcactccagcctgggtgacagagtgagactccatctctaaataaataaatcagcaggtatttataaacataggccagataatgtcacttctctgctcacaaccttccactggtaccacatctcacagcaaatggaagccaaaggccttacaatattagcaacagccccagctttcaggccacaaaattcatcttgaaactgtagcctactgagtattcttaacgtaaacatttccttaatataaagcagtatatattcgctgtagaaaaactgaaaaatataaaacatgtaaagggggaaattacttataattccacagtctaaaatagccactacactggtttttttaatatatatatctttttgtaaatctagtttttacaatttaatgatactgaggcaaacaaatttgccacatccataaaaattttgaaatcaaatagaaataaaataataaaaagacagattggcagagtaggtgttttttgtttgtttgtttctgtttgtttttttaaaaaatagaaccaacagcaagcatagtggctcacactggacgctgaggtaggagggagcccaggagttggagaccaacttgggcaaccatagcaatgtagcaggacgagccgcagacaaaactcagacaccgagttaaataaggaaggggtttattcggcggggggcattggcaagactcctgtctcaagagcagagctctccgagtgagcaattcctgtaccttttaagcgctcacaactctacgggggtgcgcgtgagagggtcttgatcgattgagcaagcagggggtacgtgactgggggctgcatgcaccggtaattagatgggaacaaaacaggatagggatttccacactgcttttctatacaatgtctgtaatctatagataatataaccgattaggtcaggggtcgatctttaactaccaggcccagggtgtgatgccgggctgtctgcttgtggatttcatttctgccttttagtttttactttttctttctttggaggcagaaattgggcataagacaatatgaggggtggtctcctcccttagcaagacttggtccctacacattttttttttttttttttttttttttttttttgagacggagtctcgctctgtcgcccaggctggagtgcagtggcaccatcccggctcactgcaagctccgcctcctgggttcacgcctttctcctgcctcagcctcccgagtagctgggactacaggcgcccgccaccatgcccggctaattttttgtatttttagtagagacggggtttcactgtgttagccaggatggtctcgatctcctgacctcgtgatctgcccacctcggcctcccaaagtgctgggattacaggcttgagccaccgtgcccggcctgcattttttaagtaaataatttttcctctttaggcctcatctggtttattttttattttttgtaagatttaaactcagacttaaacatttaattttatccatgtgtgcatatgaacctcttccattacttccaacaggtcagcattgtgtaaactacacttcagttataaaccttgttttgagcagccaggttgcagcccatacaatgttcccagtgaggacttcctcctacctatttccctccatctctgagcgagcgtggacttgctgcacgggggggtgcacacttcatgctctatgtgctgagggacttccctccggatccgaccttgttaatatcccagttgtgagtgagagcttctgaagctccacaggttaactggaaattaaattgcagcgttagttgtctcctcagaactcactggtttcatgcctcactcagaagtaactgcacaattccagggcgtccacaggaacctacaggttttgcctacccctgcccgcgactggctgatctccaaaccctctccctggcttcccgctggctgctcctgccactcccgtcgtgttccgccccaagcccctttgctttgctctctgctcctccaggcggttcctcccacacagacgtgctgggctccacaggggcgccttttgcctcaggtggatcagaacatgtgttcgtgtgactctttttttttgttttgttttgtttttgtttttgtttttgttttttgagacaagtctcgctctgtcgcccaggctagagtgcagtggcgcgatctccgctcactgcaagctccgcctcccgggttcacgccattctcctgcctcagcctcccgagtagctgggactacaggcgcccgccaccacgcccggctaattttttgtattttttagtagagacggggtttcaccgtgttagcccggattgtctcgatctcctgacctcgtgatctgcccgcctcggcctcccaaagtgctgggattacaggggtgagccaccgcacctggccaatttttttttttaatttagccaggtgtggtggcagacacctgtagccccagctacttaggaaaatgaggcaggaggattgcttgaggccaggagctcaaggcttcagtgatctgattgtgccactgcactccaggc

SEQ ID NO: 1339 - DNA, 315 bp, Homo sapiens
ttgtttttgttttttttgttttttttttaacagagtcttgctctgtcgcccaggctggagtgcagtggcgcaatctcggctcactgcaagctccgcctcctgggttcatgccattctcctgcctcagcctcccgagtagctgggactacaggtgcccgccaccacgcctggctaattttttgtttgtattttttagtagagacggggtttcaccatgttagccaggatggtctcaatctcctgaccttgtgatccgcccacctcggcctcccaaagtgctgggattacaggcgtgagccaccgcgcctggcccaa

SEQ ID NO: 1340 - DNA, 299 bp, Homo sapiens
tttttttttagatggagtctcgctctgtcgcccaggctggagtgcagtggcgcgatctcggcgcactgaaagctccgcctcccgggttcgcgccattctcctgcctcggcctccctagtagctgggactacaggcgcccgccaccacgcccggctaaattttttttgtattttttagtagagacggggtttcaccgtgttagccaggatggtctcgatctcctgacctcgtgatccgcccgcctcggcctcccaaagtgctgggattacaggcgtgagccaccgcgcccggccccacat

SEQ ID NO: 1341 - DNA, 211 bp, Homo sapiens
ggttcacgccattctcctgcctcagcctcccgcgtagctgggactacaggcgcccaccacctcgcccagctaattttttgtatttttagtagagatggggtttcaccgtgttagccaggatggtctcgatctcctgacctcgtgatccgcccgcctcggcctcccaaagtgctgggattaccggcgtgagccaccgcgcccggccaaacat

SEQ ID NO: 1342 - DNA, 299 bp, Homo sapiens
gtttttgtttttgagacggagtctcgctctgttgcccaggctggagtgcagtggcactatcttggctcactgcaagctccgcctcctgggttcacaccattctcctgcctcagcctcccgagtagctgggactacaggcacccgccaccacgcccagctaattttttgtatttttagtagagacggggtttcaccgtgttagccaggatggtctcgatctcctgaccttgtgatcctcctgcctcggcctcccaaagtgctgggattacaggcatgagccaccgcgcctggcctgaaat

SEQ ID NO: 1343 - DNA, 174 bp, Homo sapiens
tgggactacaggcgcccgccaccactcccagctaattttttttttgtatttttagtagagacggggtttcactgtgttagccaggatggtctcgatctcctgacctcgtgatccacccgcctcggcctcccaaagtgctgggattacaggcgtgagccaccgcgccccgccaaa

SEQ ID NO: 1344 - DNA, 308 bp, Homo sapiens
ctttcttttttttttttttggagacggagtctcgctctgttgcccaggctggagtgcagtggcgcgatctcagctcactgtaagctccacctcccgggttcatgccattctcctgcctcagcctcccaagtggctgggactacaggcgcctgccaccacgcccggctaattttttttgtattttttagtagagacggggtttcaccgtgttagccaggatggtctcgatctcctgacctcgtgatccacccgcctcggcctcccaaagtgctgggattacaggcgtgagccaccgcacctggcctaaa

SEQ ID NO: 1345 - DNA, 308 bp, Homo sapiens; identical to SEQ ID NO: 1344

SEQ ID NO: 1346 - DNA, 465 bp, Homo sapiens
ttttttctttttttttgtttgagatggagtctcgctgtgtcacccaggctggagtgcagtagtgcaatctcggctcactgcaagctctgcctcccaggttcatgccattctcctgcctcagcctcccgagtagctgggactacaggcacctgccaccacacctggctaattttttgtatttttagtagagacggggtttcaccatgttagccaggatggtctcaatctcctgacctcgtgatccacccacctcagcctcccaaagtgctgggattacaggcgtgagccaccgtgcccggccgaaaatctgtcctctcttacacaatacctcgagtgcactcaatttgaaatccatctgggttcacaaaccgctctagaaggaaggctggttcctgtcacttacccacttggaggtgtggagatatctgggcaccttgttttccttctaacctcaagctgtgctcg

SEQ ID NO: 1347 - DNA, 318 bp, Homo sapiens
caatgtgtactttctttttttttttttttttgagatggagtctcgctctgtcacccaggctggagtgcagtggcacgatctcagctcactgcaagctccgcctcctgggttcacgccattctcctgcctcagcctcctgagtagctgggactacaggcgtcctccaccacgcccggctaattttttgtatttttagtagagacggggtttcaccgtgttagccaagatggtctcgatctcctgacctggtgatccacccgcctcggcctcccaaagtgctgggattacaggtgtgagccaccgcgcctggccaacaat

SEQ ID NO: 1348 - DNA, 22428 bp, Homo sapiens
acatgtttccaactggaatcgtttaatgtgtctacttcttccacgcataattataaaagaataagaatcgacaaaaatattttctttccataatatgtagaggtggtttgtttcttttttttttttttcttttctttttacttttttttttgcccgcccctggcagagctcttggcggggagggaaggggagagggaaatataaccctgaggtggggatggttcagctcccaaccccggaacccctggtgtgtacgggtcaggcagacacatgtggctgggcggctgggctggggaggggacagccgccactgaccagcagagcgtggaagttcggtgcgtttcagtgcctgcctgaaagcttggggacaggagggctgtccacaggtggtgccccccgcgggccctggccgcttctcctgtggggcccgcatgaccctctgctcgggcttgggaagaaatggagcctaccaggtgctgggttgcaaccccgctgcccggtgtggaccccaagtctagatttaggcaccccttgctttctgtcttttattttttatttattttgagacagagtttcgctcttgttgcccaggctggagtgcaatggtgcgatcttggctcaccgcaacctccacctcccgggttcaagcgattctcctgcctcagcctcccgagtagctgggattataggcacgcgccaccacacccggctaattttttgtatttttagtagagacggggtttccccatgttggccaggctggtcttgaactcccaacctcaggtgatccgcccgcctcagcctcccaaagtgctgggattacagacgtgagccaccgcgcccggcctgtcttttaaataattatgaaaaatatccccccaaacaaaacacaaacatcaagttggggaggctggccgggggggacaggcaattgcatgcttgggtgctggggacggtggctggccgggccaggggactgagaggtcacagggagccccaggcggaaggcagcccgctcctctgagtctcttctggcctctccagtgcccatcagcgtgtgacctcctcctcccagaaggcggggagaggaggggctggcccgagaccaccatctctctgtctcggcaaccaagaagcagcggacataaaacccaagagcgtttaaaaaaggataaaaggcgtcggggcggtgaaggcagcggctcctcggggctggccagcgctgggcgggacaaagtgcctcactggggcccgcgggccactcagtccctcccgcctggttccccgcggaggctgcagccacttgtgctgtgatgtggcggctcccggtgggcaggctcagaggtattcctgtagaaagtgcagcaacgtgacttcatagtgctcgcccgactcggggcagcgaatactgtgtctctcgttggggtagatctgcggggagacaggaggcagggctggggggcgtggccggaccacccccgtgtcctaggctcctcccttattctggctcagggcatccgggaaggcgcaggtgctctgaggcccagtgatctgggtttgaatcccacctcggctgttgacttgcagtgtaactctgggcctctctaaaaaatggggtgaatccggacctcacagtctttgggaggatttggtaagacaaagtttacaaaacgccttgcggtgtgcacgcgcttgcacagaggaaagatttaggaagaaaccgtttgcctctttcccccaaaccggctgacgggcgaccaactcatctctgtggaggtggctgaggcttcaagcctcagggacatctggtgccctggtctcgagccatttccactttaccaaaaggcatgtgactagctctgggccttaggacagctgcctgtgaggatttgtgaagcattttctgggtcctcttagcgcccaagggggatcaagccaagaggcaggcagtaacatggaactccccaggctcctgagacctggaccagccaacgccaggcctgggggtggatccacacggggatgcaggtcctgcctctggccacgaaggagggctctcgaggcactgacggacaacccctatagctccccactgccccctaggggttggtaggaccaaggcatgaaaataaccctacgttctccacaaagaaccccggggctggccggcagcaggggcaggtggcccatctacgccacctcctgccagtgagatgggtttctgaatcatcccctcctctccaggctcctggtccccactgttgcccatcaccctgggaatgcaccaagccacccactggtttcccctcctctactcttgccttctttaatccatccctggatgaatcacgagtttgatgacaccgtccccagcctagacctctgcaaggacttgccagtctgacatcaagaccagcttccaggtcctgctgccccaggcacttcaagggcccactccttccccagcccgggcagtggcactccctggggcagactctgctgcccttgacaccagccatatgcacatgttgtgcccatgcctttatgccactctgggtcccagctgcctggttactttttcctcttggctaagagggcagatagagggtctgtctggctccccaatgagcttccagaccaagcccaaggcccggcatgtgacaaatgtgatttgtgtataaagagggcctggggccgccagctgcctggcccagatgttttggggtctttgaaacagaaggagaggtgcactctatctgtcccacacaatgccatgttcccaccccacagcctatctcatctcacgttctacttcctgtggggaggcagtgagacaggaccctgggcccaccctgtgtgctgaatgcttttcttttttctttcttttcttttttttttttcttttgagacggagtctccctctgccgcccaggctggagtgcagtggcacaatctcggttcactggaacctccgcctcccaggttcaagcgattctcctgcctcagcctcccgagtagctgggactacaggcgtgtgccaccacactcggctaatttttgtatttttagtagagacggagctttgccatgttagccaggctggtctcaaactcctggcctcaagtgatccacccgcctcagcctcccaaagtgctggggttacaggcgtgagccaccacgcccggcctgaatgcttttctgaagaccttgtttggccccagcagccttcaaggaggccgagttatcatgaccgtttcaaagacggagaaacgaggtgcaagggtgaatgctgtcccagctacctggcccctgggaaggcagtgggctcgggtctcaggctgggaagagacatctgaagttccattccagccctgcctgatatcactccctgggctgcttgggatgtggggtgtcggtggggggcaccgccaagagatcagctcatcaccgcacaaggtggctctgcctccctcctgctctgcggccccatttccctgctctgttgaaaggcaacaggacgctccccacaggacagagcatgccgaggcgcccaggaagcagaaattgtctgcagtccacaggtaataaaacctggccctcttgcctccaagatacctcctgaatctcccgccggtacaactatggaccacgtcccactgtcccccacaggccatccacaaagcagccagagaaatgtgggtcaaatggcaagccgcccaactctatgctctgctcacaagcccgagtcacctcccaccaccctcagttgaaaatccagccgaagccccgcccccgctgaggccccacccctctatagcagaagctccaccctgcttactgagggccccccctcctctacagcagaagccccaccctcctcaccgctgaggcgctgctcccacaccgagccccaccctctccactaccgaggcccttccccacaccgaggccaaccatttactgcggaagccccacccaccgtaacactgaagccccgtccctctgcagaagtcccaccctcctcgccattgaggccccgcccataaccatgcccaccccttagcgcagaagccccgcccacctagactgagccccacgttgctgccaaggctccacccactcccccactctcctcccgctcggtcccccaagcctggctggctccactcactctagcacccttcactgctgcctcctcagggaatgcttggccccagcgccttaggaaggagcctgctagggccttcagcactcagcggtttcttctacgcaatttctcagtttcaaataaagcccgtctgcggggcaatttcggtaagggttcctccctccattaggcccggagcaggggtgggtgtggcagcccccgatcccgtgcttccagcaccgaaggcaggcggaaccctgagctgtcaagacaggactgatacatcaatggccctgggagctgggagggcggggacacagggctgtggggtggggggctgggagccccagatcccccagggagcccctggtcacagtgggaagccaccccgcctcgtcccaccccccactcccagggatctgtcggctcgcggaggggccgaagcccccaacagccacccacctggagctggtaaggtttccctgctcggatcagttgggagacgaggaagtttgtgtggaaaaagtgcacgttttcgtccaggaagccgtggaggataagcaagcggttgggcctggaaaacagatggggaagggtctgaggccagggattgtccgtggggtaggaggggagcagatcacaaggtcaggagtttgagaccagcctggccaacatggtgaaaccctgtctctactaaaaatatatttaaaaaaaattagccaggcatggtggcaggtgcctgaaatcgcagctacttgggaggctgaggcaggagaactgcttgagcctcagaggcagaggttgcagtgcgctgagatcgcgccactcactccagcctgggcgacagatggagacagcatctcaaaaaaaaaaaaaaaaaaaagatcagctgagtgtagtggtgcgcctgtaagtccagctactgtgcaggctgaggcgggaggatcacttgagcccaggaggtggaggctacagtgagctatgatcataccactgcactccagcctgggtgacagagcaagaccccatctctaaattagaaaaacaaaaacaaaaacccaggccgggtgcagtgcctcatgcctgtaatcccagtactttgggaggccaagctgggtggattgagtccagttgtttgagaccagcctgggcaacatggcaaaacctcatctctacaaaaatatttaaaagttagccaggcgtggtggtgcacacctgtggtcccagctgagcctgaggcaggaggatcacctaaaccctgggagggtgcagtgagctatgattaaaaaaaaaaaaaaaaaatgctgagcatggtggcttacacctgtaatcccagcactttgggaggccaaggcaggtggatcacttgaggccaggagttcaagaccagcctgggcaacatggtgaaaccccatctctattaaagatacaaaaattagctgggtgtggtagtgcatgcctgtaattccagctactgaggaggctgaggcacgagaattgctttaacctgggaggtggaggttgcagtgagctgagattaagccactgcactccagccgggaccacagagtgagactctctcaacaaaacaaaacaaaaacccacctaggtctgctgctgtctgtggtctggagtgtggcatgggctactggtgaggccaacacgcagcctcaccagaatcggctgccctagcccttcctgtccgatacgggagccagtggccacacgtcgccgttgaaattccagtttacattcatccaaattaacggaacttataaacccattgagacagagcacagatcggtggctgccccgggacagggagtgactgctaaggaatgggaacagggtttgacgctggagtgctggaaaggttctggaaccactgcaaatgcaccgagggctgctttaaggtgactgttaggttctgtgaatttcaccacaataaattattattttttgagacagagtctcgctctgttgcccaggctggagtgcagtggtgcgatctcagctcactgcgacctcacccttccaggttcaagcaattctcctgcctcggcctccttgagtagccgggattacaggtgtgtgtcaccacacctggctaatttttatatttttagtagacatggggtttcaccgtgttggctaggctggtcttgaactcctgaagccaccgttcctggcctattattattattattgttttgagacagtttctctctgttgcccaggctagagtgcagtggcacgatgttcgctcactaccaactccacctcctgggttcaagcgattctcctgcctcagccttccaagtagctggcattacaggcatgcaccaccatgcccagcttattttttgtatttttttgtagagacggggtttcaccatgttggccaggctggtctcgaactcctaccttaagcaatcctcctgccttggcctcccaaagtgcccaggcagacttttttttttttttttttttttgaattggagtctggctctgtcgcccagactgtagtgcagtggcgcacgatctcggctcactgcaagctccgcctcccgggttcacgccattctcctgcctcagcctcccatatagctgggactacaggcacccgccaccacacccggctaattttttgtatttttagtagagacggggtttcatcttgttagccaggatggtctcaatctcctgacctcacgatccgcccgcctcagcctcccagagtgctgggattacaggagtgagccaccgcgcccggcccatgcccaggcagatttttaaccccctaggtgactgcatgggattccggggaacattttctggagacgtgccagaaaatgggaacactgttttctctccatcagagaataagacccatgtcaaaagcataaaatgggacatctgagctggtccctggccctgtggacatctatgtcctgaagcacaagacagaggctgtgatggggcctccagcaggatgcaggggagtgggggaggcttgcctgtgaaaagcagtgactcgaattccctcatctttcccagggcagggctgtgagcctccttccccagacaagcatccctgggtgccccttcctgcaaggtgcagtgaggagggagggtgggctggaggggactgtgaggcacatgcaggcagacgccaccacaggagcacagcggggaggctccacatggcctgaggctccctgggcagggccagctggggcaggagggcaccctcatagagacagctggtgccggggtgcaggagaagccccggggaggagcgcagggcagggcagtggccttactcattgggcagcttctccacgtgcagggccacggaacccgcctcatagccgtgctggttgttctcagggacgtccatgtagcgctcagtgtaccctgtgtcgtaggccatccagacggtgaccggggcacccgcgatggccacctgagggacacagcagacagatgggggcagagagagagagagaaacaggcgtcgggtcctacagccagcatcagccgctgtcccggggccgccctggagcccgtgaggagcgctcatgcacatggggccggcaaggaaggggccctcagaccgcgtggcccccgtggacggtgcgtggcatgggggtgggcagggcgccacaggcgggcaggtgcggcccctccccgccgccgcagagggccgggtcccactgcccgtctgcctcctcctcctcctcatcgccgccgccccgcagtgccctgactgccgccggcctggggcccccccgccgctctgcacaccatgccccacctctgcccatccgaggccggggtcccgggctcagcctcccacagagagctgctggcggggttttgtgcagccggatgccatcctgcggtcggcggtggcgggcaatgaggaggggggctcggccccgtggggctgctgcagggagaaacagccacgtggcaaggcccctgccgaggcgcctccccggtaggtgggctccgggtggcgcgggcggtgggcaaacgcggcgtagatggggaagggggcagggaggggcgtggctgaggccggccaggggtgggacccaccttgaacacctggggcttgtggattagccccatgagcgagaggaagcccccgtaggaccagccatggatggcaactcggctcaggtcgatgaagccatacttctcggccacgaactgcaggccctccacctggtcctcgatctccacctggccctgagggatgaagccgggcacctctcagtggcctcctcccggtatgtccctcccctgcagtgacacctctgctcctttcagggcgtctctccctcttggatgaaaagtggctcgctggaagccccctgtccttccaggccctgctaaccctgcctgctatctggggatggctggacagatccagcagccatcttgctctgccacctcccaggtgagtggctctgggagccacgtcccctctgagggcgtcagtttgcccatccctaataaagggacattaacaggaagaggacccattttctagagggcacaaggaagaaaaagacgggtgcccaggcatgtgcaagggcacaaagaatggctggtgccatcgccgttgtcactaccagccacatccccaccaccgccactgccacgatttcaatgctggtgtcccctctgaagtccgtgctgagatcactactgcggccttcaagcgactgatccatggggcccactcatgtgaatgggatgaggggcccttataaaagggcctgatggagggaggccacggcttttccgctccttgcaacccctctgccgtgtaggaagcagcacagggcctctctggagggttgctgaccaggcaacctcgtgggaacagagagcagccctccccgacacagccctgccttggccttggacctcccagcctccagaactgtgagagattttcgttctttataaatccccaggctgtggggttttgttccagcagtgcaaaggggccgagatgatcgccatcaccaccgtcgtcatcaccagtgtcagcacaacttgtctctgtccctgcagggcgcagcccagagctgagcagcaaagcatacatccccttttgttctaaaagggcgcctcattgagcctgcgtcaccccagccagaagtgcccttctgcgggtggtattccagagccgctcccatgccctgcacccacacggcccagggctcccttcccgagacccaaaggacccagagcaacagggaggagttgttaccatttggtttttcagggccccttcgaaccgaagccctcgctgacaggagcccctgccgtcaatcacaaccacggcgtagcccagggaggccagtgtgttgagccgcaagtacttgatgcctttgaaggagttattcaccagctgcacctgtggggaggtgagggccagcagtccagcacgagatgccgggcaggacgggcctggcaggggagatgccggtgggctggggaccgggccgggctggggcctcagagcctaatgaaagcacctgtgccccggaggctctggatggacacctgggagtggcaaggcgggaggggcccatactcgggaccctgctagggagggggaagggccactgtcaggctctttctcagctgggccactgccccagtcctgcctggaacaactactctggcatgatggacattggggtggctccttctcgggtggggccatctgggcactgcggggtgctgagaagccactccaggccaggagaactcgcagtggtgatgaaccacaaagtacccagacatcgccccgtatcctctgtggggacagagctgctctgggtaagatgtgcgcctaagatggtccaactgccaatctgctgcctgcttttgacccctgctccaggaattgggcccagggcccatggccacctccataccaacctggagactaggggacttcctagaggaacaagggagagtcagcaggcggagggggaaggggaggccatccaggaagggcggggagcgtgcaaacgggcacagagaaaggagggtgaggggccccgaggaccctgtgtagtcagggcaggcggggtgggctggggcaccaggcaggtagccggggagcctcctctggttgactgttctacagctggcacttgagtggggatggggagtcctcgggtggatggtggggtgggggcctggggagcaggtgtgcactcacctgggggcctccatatacaaagaggacggtggggtgcttcttccctggctgcaaggcgtggggcttgtagatcatgccgtagagccgcacatccgagcgcgtgtggaaatggaagatctctggaggaacataatccggggggcagcctgcgggagacagggcggctatctggctgcccggggaagccacatccagctgacacccttgttctcctgcccaccccaagccttggagggtggaccaaagcaccccctcttttcctgggcttcccgagagttgataattgaaaaaaacgtttttttttcattaaataagatttgtacagtttttgtagagatggggtcttgtctccctgttgcccaggctggtctcgacttcctggcctcaagcgatcctcccacctcggcctcctgtgtagggtcactgctatttttgcaaagcaacagttgttgtccaattaggatggtgggggtttttctgttttttttctttttcttctttttttttttcaagacaaagtcttgtgatcttggctcactgcaacctccgccttcctgggttcaagcgattatcctgcctcagcctcctgagtagctaggattataggtgcacggcaccacgcccggctaatgtttttgtatttttagtagagacggggtttcaccatgttggccaaacttgtctcgaactgtatttttttttttttttttttgagacggagtctcactctgtcacccaggctgcaatgcagtggcacgatcttggttcacggcaacttgcacctcctgggtttgagcaattctcctgcctcatcttcccaagtagctgggattacaggtgcgcgccaccacatttggctaatttttgtacttttagtagagatggggtttcaccatattggccaggctggtctcgaactcctgtccttaggtgatccacccacctatgtctcccaaagtgctgggattacagacgtgagccaccacacccagccatcgaactcctgaccttgggtgacccgcacaccttggcctcccaatgtgctgggattacaggcgtgaggcactgcacctggcccaaagttttttctttaaataaatgtatgtaggtaaattttggtggggcaatttataggaaggtgagtaaagggtactacaggtctaggggtagcagaagtttactgtggagggccagatagcaaatatattgggctctgggaattgggcgtggcgggacacgctccgtgctgtgtctctgtgtcatctgctgcggtagcgctaatgtggccacagaccacagagggactgcacgtggctggatttggcagcagttggcctgctcctaatgcaggcagtcttcaaacgtggcacagattgggagtttcgggaaacagtgcctcgttccccagggcactgaggttctggtctctgcccccactgctaggctgggtgccctgctgagccccttcccctccctgacccatctcctcatctgaagccagggctccagctcctggcggtgtcggtgcggacaggagagtgaggactgggctctagagggaggcctgggatctgtttctgctcaggggtgagggcatcacaaaatgctttccagcccacggaataccccgcatatgctggaaattcgttgtgtttagaatgttctggaaacccaccaacatggcagagacagggccagggtgggttgtccttgtactgagtgatgcctgggagcccagcagtgtgctgacccgctggttttcatcccacactctgtatatacagtttcgttgataaagaaacacttcatggtgatacgctgatgtgtgtgacggagccagcactggaacccggagtcaccaatgcagggtcctggccaacttccaggttctgggcaaggtgtcaggttgcctcatttcctgaggcccccctgtgactgaccctttgctccttttcctgataaaggcctcggagtgtcggctctgagcaggtgctgctgtgggcggcagcctctgggcacaggacaccataaagggccctctgcatgccgctgtggccaggactgcagggtcctggagaaggtgagtggaaagcctgataaccacggcgggtttcaaaccagtgtgggtggactctgacatcccggccacccctgcatggaccaccactgttcaaaaggttttttttttttgagacggagtctcgctctgtcgcccaggctaaagtacagtggtgcgatctcagctcactgcaacctctgtgtcctgggctcaggccattctcttgcctcagcctcccgagtagtgggactacaggcgcccgccaccatgctcggctaattttttgtatttttagtagagatggtgtttcaccgtgttagccaggatggtctcgatctcctgaccttgtgatccacccgcctcagcctcccaaagtgctgggattacaggcatgagccaccgcgcctggcccaaaatgtttttaatttttaatttttttttagagtcagggtcttgctctgttgcccaggctgaagtgcagtggtacaatcacacttcactgcagcctccgacttctgggcacaaatgatcccccccatctcagtctctggagtagctaggactacatgtgcacactactacacccggctaatttttaacatttttgtagagggagttcttactatgttgctcaggctggtctcaaactcctacgtgcaagcaatcctcctgccttggcctcccaaagcattgggattacaggcagaagccactgtgcccgctgatgaaaatgtttacttgtcacctgcccactaccctgggagctcccagtgacagggtctgtgtctcactggttaccattttggcagggggttggcacggagctgcatccctgccgggttctgtgcagtccggccctttactgcagctcgaacccaggaccgtctcggacggcaggggctgtggcttatgtcctatgacgagttcccagatgcttggaggggcctgggtgctgtgggaggccaggcaggccagctccaggcctctgcctctttccccagcatggggccctcgtcccgttttacagccgggcgggcggaggcctccgtggggcggggcaggggctactcactggctgcctccatcatgctagcccagaagcggggctgcttgtgcagggggtcgtcgtcggggccgctcagcttgtagacgtgcacgcagggcggcgtgctcacgctgctgtagtggctgacgaacatgtcgaagttctgggggtggaatggggtgatgagctccacgggatgccgctgcgccctttccactgggtgccgaccgcagatccagggtagcttccctcccgcccgcccccatccctctgcccctgcctgtcatgaaacctcaaagctccacccgctgctgcaaggggggcaccactgccatcgccccattctgcagagcaggaaactgaggccaggacgagtctgtcccccagccaggggcctatggacagtcaccgaccgctggatctgccgagggctctgccactgcacaggcctgcaagcttgctggctccacagctggcaaactgcagctgactcgtgccctggactaggggtggccctctgcatggccaccgcctgacattctagaatgttctgagaggctaagggccacatcccaccgcacacagagcggcggagccccagctcagcggacgggcactggggggctccaccacttactaccctgggattggtggtgggcaattcactcccttccctgccctacccaggaggcaggggtgggcactgcctgccccaaggcagctatgagaatgcgagaccatgagaatgaccctgagtgctgtgccgggccatgagggactgctctggctgggagctgttggacgggcacagggcggtgccgtgaggctgggcggtcccacctggctcatggagcagctatgggagaagccgggcgtggtgaggcgtacgatctcgccggccgcctcatagctgaccacgtagaggtggtgctccagcggcgtgtccttggtgccctggaagtacaccagcttggtctcctcattgacccagatctgcagggggacaggggatcctcgtgatgcgtcccagatgcccctgggcccacacccctctccacgccccacaggagtgggccccatgttcctcggactggggacgcatgctgtcctcgcccaagtctggctttagggctggagatgaaccatccctgagagatgcgcttatctggccccgtgggctgggagcagcccctggtcgagctgggaactgcgtgtcctcaggcgggacctggggcctgcattccacccccagacagctctttcctagcttgaattgggagggcccaccagagccaggtgggaaggccagggagggcaccgtgcccgaaacagaggctcagggaaacccggcagtccccagcctggtcagccgttcctccgacccaggtgcttgggttcagaagtggcagggccctaccttcctgtgggaagccccagtaggccccgaagtggtgtctcctggaggagtgggagggcagcctgcactgcgtggagcagcggggcccctccttcacctgtgctgggatgctaatggtctcgaaacaactgctgctgcccaggagcgagcaggctttggctgatgcctggaaaggagccgggaggcctcagagccccgagggaggagagggcattgcccctgtgcccagggcctgagaggccggtggaggcagctggagcgtggggtgaccagggaccctaagacgtgaagaaactgaggataagtggtctcctgggacagcggggcacaagcttccagtcgggggagcatcatgccccacaacaaggcagctggacgcatggccccagacggcctgcagaggacacacttcctctttcatgatttctaaaaggcttccaatgttttccttaatttcagggtgaaaggataaagcacgtgaatggcacaacgttcaagatgagacggggaggtgatgaaatgattggcttgtgtgtatggtagacaccgtgctgaggcctgcgaactgctgtaaagcagggtcctcacaggtgtgtgtgcgtgtgtgtatgtgtgagaatgagtatgtgtgtgagtgtatgtgtgtgtatgcgcgtgcgtgtgtgtgtgagtgtatgtgtgtaaaacacacatgcatggagcaggggaaggctgcaaggagaccctggtaccttggagccgtgcctcgccaaaacctcccattcaccgctggtcagagcaatctcttccttaatggggcacttaaattcatctggaaagaaagaaagaagggaggtgaaggggcctgggaggtgatgcaggcgcccaaaggcacccaggccaaattccacccgagcagactcaccatggagccactgaaaccccggcttgctgtgaactcagacgccagcacaggccactgcgtcagacctgccacatgggcaaggaagcctgcggggcctgttcctgccatgtggatggcaggcccagtgtttcccacgataaaccaggagacccgtggctcactcctgaaatcccagcactttgggaggccgaggcaggaggattgcttgaggccaggagtttgagaccagcccgggcaacatagggagaccctgtctctccaaaaaaaaaagaaaaattagccaggcgtggtggcgtgtgcctgtggtccaagctacttgggagattgagctgggaggactgcttgagccaggaggttgaggctgcggtgagctatggttacaccactgccactccagcctgggcgacaacaagaacccgtctcaaaaaaaaaaaacaaaaaacaaaaaacaggaagagaaaccaggaatctggattttcattggaatttcccaattttagaaccctccaaaggccacatgacatctgtgtgtggcacgggaaggggggcggggagtgtgggggaggagccaactgggcccatgacctcttaggacacattaggactttgtaaaaccagactttttttttttttttttttttttgaagacggagtcttgctcttgtcgcccaggctggagtgcaatggcgtgattttggctcactgcaacctccgtctcctgggttcaagtgattctcctgcctcagcctcccgagtaactgggattacaggcacctgccaccatgcccggctggattttgtatttttagtagagacggggtttcaccatgttggtcaggctggtctccaactcctgacctcaggtgatccacctgcctcagcctcccaaattgctgggattacaggcacgagccactgcgcctggccgactttttttgtgggggcgagggggtagagacagggtcttactatgttgcccaggctggtcttaaactcctgggctcaagtgatcctcccacctcggcctcccaaagtgctgggattccaggtgtgagccacatccccggctggaacaagatgctggtgaaagcgctagggctagagaccaaggctctgctggttttatgattgtttttttggggggtaggagggttgacttcatgtttgaattttcaccaggtaaagaatgacagtgcggggtgcatcatggcacacagcagaaacacactgagatggtttgtaactgagggctcactgtcctttcctaaccttttaggtctaaacaagctacggcaaacgtgtctgtcaggagcacgggagggcagatgtggtttccctggcgtagaggtctgggtgtggttacttgtggcatcggggcctggggaggagagcggttcccacccagccccaagacccaggctcctgcccgcgtcccgacgtgttccttctgatgcaatgtcacttggggtcacctcctcgccatgcagctgctgtctaggagatgcatggtgtgtgctgggggctgagcagggtgctgggaaatctggtgtgcccacctcacaggccgggggtccctgggggcactgcagcagcctggagggtctgtgcccctggagagtggcagctgcagctggctccacttgagaccacatttgaaacgtgagcactcgggctggcccattttcccacagggggcaaaatgagcatttacatgaaatcccaatgccagatggcggtggctgagccagccagacagaaagtgaaacaccaatgagccgaagacagctcccctttgagacgcttagccagtaagtctgcactggccgcatcccacccaggaggaccccgatgctggcctgaggcagctgtcaccccgccggtccgcatcatactcagctccgtggcagcctacagcatcacctgtccctggctcattcgcccttcagctcctgcagtcccggatgcctcgctccctggggtctctgtcccctgtgttgggggacgccttggctgctgtgtgggctctgcccccagagggcaccggaccacatctagggacatctgtggttgtcacaactggaggtgctcctggcatggagtgggtggaggccagggatgccacttggtgcacaggatggccccgccccagagaaccacccggccctggcgtccatggtgtccctgctctaactttgaagagcctgggccgggctcccggaccaccccacctctctatccagaagtgacccttgggagctctgtcccatcccgaggctgacactgtcagtgtgcaaggacacctgcaatcccaccaggagtctcggttccctgagctccaggcacgggaactggcccatacagcatctccactaccgggcacctcaacttgaacacatccaaacccgactctggattttttctctcctagaacagtccctctctgagtctgtcttagactggacctgcggagccctccgggcatccatgccgcctccctcctctctgatcccccaccctttccactgcaaacggtgtgggctcagctgtccaagcacatccagaatcagacccaccaggacagctcagccactgccatgacagcaagcctgtcgcctctcccggcccctgggcctgtgtgcaagctgcaaccagaggagtcatctgaaactgaggtgagggtgacgacttcctatttctctcggggtcaaagcccaagtcctcctggagccccagcaggccctgcaccatctgctttttctctccccaccctctcctccctctctccccctcctccctgtgctccagccacaggggcctcctccctattcctccaacatgccaggaacagtcctgcctgccccagggcctttgtacgggctgtggctctgcccagagccgtggtgtggacccctcacctccacagcatgctctccagagacgtcctcatgccctcccgttgtagaaagaaggcccctcaccctcaagcctctcgcccgactgcatttccttccaccacgcacatcacaccagaggcagcacctctaactgtttctggaatactgcctcctccactagaaggtcccaagagcagggattttcctttttctttatttacagtgaacaattccatcacagctacctacagcaggagctggcaaatgtttctacaaagggctagacagtaaatcttggccttgcacaacagtttctgctgggactacccagttctgctgctgcagcacaaaagcgaccacagacagtctctgtaaacaagtggctgtggctcagtgccaataaaactttatttatgaacacaggtggtgggccggatttgacctgtgggccgtaggtggccaacccctggttgtgctaagggcctggcacaggggaggtgctcagtaaatctgctgcctgaataagccaacagttgggtgctctaagccctgccagatcatgcagtcactggggaaggctggcttcctgccgatccctgttccttctcccgcagggtgtgctggctgagtgggggggccgaccaatgaacaaacagcatattgaaccacacgtgactaacgcgatgagtcgacagcattcgtcaggctctgctcaccttccccggggctgaagggctcactccaatcgtagccctgggattttaaaacggcggtgactttgtacaaatggcagaagccggtcttgcattcattggcgcggagaaagcagagctcgtcctctccctctgattgggggaagggatagaagatgtcatgaacctgtccggaaagcagatagaagatgcgtcagaaggtgtgggtggccgggcatggtggctcacaccagtaatcccagtagtttgggaggctggggcaggagacttgcttgagcccaggaatttcagagaccagcctggacaacatagtaagaccccacctctaaaaataaataaataaattagccaggcatggtggtgcaggcttgtggtcctagctactctggaggctgaggtgggaggatcacttaggcccaggaggtcaaggctgcagtgagctatgaccacaccactgcactctagtctgggcaacagagcaaccctgtctctaattaaagaaaaaaatagatgaggggagaggctccaatggctgccagactcaccaacccccctagaccctcttccctgccagccagggatggccaaggcctgagctcacttctccacacaagggcaaacaccacctgccattggcgctcagccttctaggacgtgggggtggggacagtgtgactccagggcccaggcgggcatacagccagcgcttgccccgcttacattgatccagacgttggtgacctcctcgtacaccacatacggctggacattcctggggacagctctggcagaggctagccgctgctcctcattctctgtgctcgggatgaacagggccggggggaggaggacgagctggagccactgctggggccggtccaggaacatggcccaggcgctaagggggaagatgcgggggaagatgagagggaagctgggagcctcagtggcctgcacagagaagctggggacgcagcgtccaaacccgtgtggaatcagggctgggcttcctgcgctggcttcacctgcacttggccaagtaaccctgcagcacccacaggcttccttcctggcacatgcttaggggaggacaggatgggtgacaagatttcatgatccaagtgttccggaaacaatggcctaagtctcacagcggcaagctctaatagtttctcctcttcactgactcttcggcccacagtcgctatcctttatttcgtagtttgctttattttatttatttatttctttatttaattttttgagacagagtttcactcttgtccaggctgaagtatagtggcacaatctcagctcactgcaacctccacatcccaggttcaagcgattctcctgcctcagcctcctgagtagctgggattataggtgcctgccaccatgcccggctaatttttgtatttttagtagagacaaggtttcatcatgttggccaggctagtctcgaactcctgacctcagatgatccgccagccccagcctcccaaagtgctgggtttacagacgtgagccaccgcacctggcctaaatgaacaatttttaaacttgaatttattttaagaggagatgttagtattctacgtggaaaagcagcacctccacacacagaacaacgaaaaccaaaccaaagggaagcatcacagggacataaaatactaactagagtgggtgcctgggctcaggcctgcaatcccagcactttaagaggctgaggtgggcgggtcgcttgagcccagaagttcaagacctgcctgggcctgggcaacatggcaagaccttgtctctacaaaaaaaaaaaaaaaagtccaggcacagtggctcacgcttgtaatcccagcactttgggaagccgaggggggcggatcacaaggtcacgagtttgagactgtcctggccaacatggtgaaaccccatctctactaaaaatacaaaaattggctgggcatggtggcacgtgcctgtactcgggaggctgaggcaggagaattgcttgaacctgggagtcagaggttgcagtgagccaagatcataccactgcactccagcctggtgacagggcaagactccgtctcaaaaaaaaaaattaaaatattagctgggagtggtgactcacacccacagtcctagcaaatgtacatatggcagcagcacataatagaattcattgttaacattccattggaggcattaaccaatgcaattagaaaagtgaacaggctaagaggcataggaatgcaaaagcaagaccctcatatctataaaaaatacaaaacattggccaggcatagtggcgagtacctatagtcccctctactcaggaggctgaggtgggaggattgcttgagcctgggaattcggggctgcagtgagttatgatcgcaccactgcactccagcttgggcgacagagcgagactccatctcaaaaaaaaaaaacaggcagaggctgaatttgcccactggggtttggggcccccgtttagggaggtggtagagttctctcctcgacatgggtgggaggctggggagtgagtacaggggagcacctctactttgtgactcagtttttctgagcctgaggtctggggacacctgaaatcccctctgtaggtctcctccacactctgggtaactggatcagcatgtcctagtggcactaacactgggactcataagtccagtgtttcatcctcagactggctgaggtcaggagggccctttggacactggtctgaggcctgtcctggcggttgcactgcgggaagacgtgagcagatggaaggaatggcacggaaggccaggaggcagcttcggtggctgcccagggcccagggccctgcaggtgaattccttgggttccagccagagacactcactatttgccatcccgggtccacccggccctggcgatgtactccaccttcgggaacagcgagctgaagggctgcaccagctccttctcctgggtcgagacgatct

SEQ ID NO: 1349 - DNA, 210 bp, Homo sapiens
ttcacgccattctcctacctcagcctcccaagtagctgggactacaggcgccctccaccatgcccggataatttttttgtatttttagtagagacggggtttcaccgtgttagccaggatggtctcgatctgctgacctcgtgatccgcccgcctcagcctcacaaagtgctgggattacaggcgtgagccactgcacctggcccaacat

SEQ ID NO: 1350 - DNA, 737 bp, Homo sapiens
aaatctatttttttttttttttttttttttttttttgagacggagtctcgctctgtcgcccaggccggactgcggactgcagtggcacaatctcggctcactgcaagctccacttcccgggttcacgccattctcctgcctcagcctcccgagtagctgggactacaggcgcccgccaccgcgcccggctaattttttgtattttttagtagagacggggtttcaccttgttagccagatggtctcgatctcctgacctcatgatccacccgcctcagcctcccaaagtgctgggattacaggcgtgagccaccgcgcccggccgcaaaatctattttttaaagtgaggtgcccagaatgaagaaaagatggatggggacccttccctccctcaagcaggtcagattgctgggaatgatggtccaggctcctggcccccatcctttcctgtcaaggctacacctaagtgagggtaaaaaatcctggagaaaaccactgcaggaggcagaagcctccccagtgtgtcctacttctgaattctgttattggaccaaaagagccctctgctcttctcctccatatttttcactgttgctctctgggtaatcagaggcagagggaaaaaaaagtaacctttcctgatactcttgcccttgtattttgttcaaaactctctgttaccaaaggaatgattaggaacctcagttggaggttctgaaatcaaaatcattgcgttg

SEQ ID NO: 1351 - DNA, 138 bp, Homo sapiens
tttttttgtatttttagtagagacggggtttcaccgtgttagccaggatggtctcaatctcctgacctcatgatccacctgcctcggcctcccaaagtgctgggattacaggcgtgagccaccgcgcctggcctagaa

SEQ ID NO: 1352 - DNA, 4702 bp, Homo sapiens
tttgtttgtttgagacggagtctcgctcttttgcccaggccggagtgcagtggcgtgatctcggctcactgcaagctccacctcctgggttcacgccattctcctgcctcagcctcccgagtagctgggactacaggcgcccgccaccatgcccagataattttttgtatttttggtagagacggggtttcactgtgttatccaggatggtctggatctcctgacctcgtgatccgcccgccttggcctcccaaagtgctgggattacaggcgtgagccaccgtgcccggcctgttctttaaaaagaatattagattatattttctaaatgtgccaagtatctaagaatatattctttcacctcctgctgataagagttatacatttaaccttaagcaaatctgccaagattctatgtcatttatgctttgatttatgtgagtattaatgtagtttctgtgactattgtatggttatatataccctccacctagtaaaacagttccatattcctggaaatggtcttttacatcccacaaatgtagctggaaaggaataatataaatactaatggtttgagagacaactagtcttgacatgtcttggttgaatagtgttctataagcaacaatatatgaaatactagacacacccattaaaagtagaaaatacccactactgttctaaaattattctgcaagatctcaccaatgcaatgagacataaaacagaaataatgggtgtaattattgaaaattggagataaaatttttattacttgcaaacaaaattctctgtgtcaaaaacctgataaattaaacaatacaattaatatgtttaatagaactaattacatatgagaggcatccaaaatccattttttctatacaaacatggtttgatatacacagtcttgttttatctgtgtattaattggttgatgaaataataaatggaaaaatcaagtatgcattatcaggttaaagaagcaggagagacagagccataaaaacaaagagagaagaatgttgtaaggagggcttaacgaccaggataaatgttgtagagagatcaattaaagtgatggcctagagatcacaggcttcctttggcagagccatgttggtgaagtgaaggaagtggaagccagaccacaatggttgaagaatgaatgtaatgtaagagccaagacatttatttgagtttgatagtaatgaaaaaggacgagaattttcttcttgctgttgtttttgtcatttcatgttcaaaaccctttatctcccatgtgggactgaaaactccaagatgggatctctgtttctgtgaggcctgtagtgcttagtacatccttgaatgtgtgaggctctcattggtataagtttaattcctgactgtggatgaaagctttaaaactttgtgggcaaaatacagaatgaatttcagtgagttcccatgtattaaacaaggtggcgctggctggagacatgctgtccctgtgcccacaggagtagcagtgctgtgctcatcttcctgacccgctcttcacagtcttcaccgcctttcttcaggagtctcccctttggcttttccacagctatgaaacccacgtagtcggacaccctgatgcttctcctgcagggcgtgtgatgaggaggtgagcttggctttggagtgctgggaacctgaggaattgccaaggacccagagcccagccctgaccacccagagagcccaaaacacaatgaacaaattgaatttccacaacagagtcatgcaagaccgccgcagcgtgtgcattttccttcccaatgatgaatctctgaacatcatcataaatgtgagtagatctcaatataattctgatagctggaggatagtgtattttcaggtttgctggaggaaaaaaactggactttaaataattaagacaaaatgattgtattaattgacttctatgcttaatcactaatttcactttttatatttcccttgacttttgggggagaaatagtctttgtctcaaaagtgggcttcagtgacctatgggtctgatgaagcaaccagggataatgagacaaggatatttaatggcaacatgccagcaattattattagttaattgaaagcgtttatgattttggcctggggccaatgctttccccctctgctgggctaacatgtgggtaagggagaggaaaagctttgtttcactttttaaataaaagtattacgtaactttgaaatttgtataaaattaaaagatagtaaaaacaactattctaacagaattcaaaacctgttatgcttcagtggagagattattcaagataagtctgtgggaaattgggagtacatttctactggcaaagttagtgataactatgcacttctgacaaaatgtgaaatggggggtatgggcgtgtcatatcatcatggtgcagatacgtggatgtgtgcttccaaacaatggcaacctaactgactgctggaaccatacaaaatacctgaaactactcagaaagaaggtgaaaattgcatgcaaaaattatttgaaaaatattgagctaacacaacatgaattttgaattataagtgaggtattgtaactcacctacagatgtgttttttgtaatcaatattcatggactcagactacacagtaaaagcttacatagaaatcattctatctaaactttctggatatgaaagtaacttactatgtgttttgctactatatctttatatgaatttaaatcacatttccaagtggcttacagtaatcaaggttaatttgtcacaaggaagatgcaaattaaaaccacattgcaatatcactgcacacccactagtacggtttaaaagaaaaaaaaacaaaatatcaagtattggtgaaaatgtggagcaaacagaactctttttcaataatggcgggtatgtaaagtggcacaaacactttggaaacctgtttggcattataccatactaaacctgaacacatgcattgtttatgacccaggaatgcccctcctgggaaccaacaacaacgcatatatgtgttgcatatgttcaccaaaagacatttacaagaatgttcatagcagcactatttgaaatcgcccccaagtagaagatgcacaaatatttaacagtagttagataaagtgtggtacgtttatgcaatataataccatatagaaacgagagtgagggatctgcaaactaatatgcaactgtacaaatgaatcccacaaatataatgttgggtggcagaagccagatgcaaatgaatacatgctgtagatttcattcttttacattaaaaaagctagtcacacaaagttatgctgttagaagagagtgatttggtcgggcgcaggggtagttacaggaagggagtacacggagatttctggttgttagttatgttcagtgtcaatctaggtgctaaacaggtacaataaagattttagaattcatcaatttgcacacttatgatagatgcactttcctgtatgtatatttcaatacaatcttttaaaaagtaaaatgacaaaaagacactattaacaaaaatgacatattacattaactgttatactaaggaaaatataaaaatgagttctataacaggggctctgcaggtcatgtggtcatgccaaggaccatatgtgctcaagattctcatgacattttggaaggaggttgggctttctttatctttcctttcttctctcccttcccttcccttccctatttttaaacctaggtttggtattttcctggggtgatggtgactttggaaaattgggccggggcggaagtgaaggctgcaacattccccagaacattgagagactaaatggacagggggtgtgccagattgagtgtggagctcagttcctactggcgctcaccaagtctggagtggtgtggacatggtacgtaaacgtcctccccatcacagtgtgcgtgcttgtgccggtgcgtgcagggaacttgggcctcgccccaggaccaccccggcgtgattgtgacctgtcatatttttacttatgcatgcatctttgtcctttaaaggatattgagtcgggattagtgacaatagtacaagaagaaatttcctattgtaactgggtcattttgaaaatactagaaaaattttaggccacttacctttcctgtttgggcgagatttataggaagtgtttcttctgctgaagcctaaggataaaatgagagcaaaatagccttctgaatcctttgatcctgagaaagttaacatgtatttcttgttaaagcttattatattaatgtgcaaaagagcaggtgcccagactggccttggatgctgtgtcaggccttgctgcctctggtcataacattggcactatttatttatttatttatttgagatggagtctcgctctatcgcccaggctggaatgcagtggcacaatctcagctcattgcaagctccgcctccggggttcacaccattctcctgcctcagcctcccgagtagctgggactacaggtgtctgccaccatgcccggctaatttttttgtatttttagtagagatggggtttcaccgtgttagccaggatggtctcaatctcctgacctcgtgatccacccacctcagcctcccaaagtgctgggattacaggcgtgaaccaccgcgactggccaacattggcac

SEQ ID NO: 1353 - DNA, 299 bp, Homo sapiens; identical to SEQ ID NO: 1340

SEQ ID NO: 1354 - DNA, 295 bp, Homo sapiens
tttttgagacggagtcttgctctctgtcacccaggctggagtgcagtggcgcgatctcggctcactgcaagctccgcctcccaggttcacaccattctcctgcctcagactccagagtagctgggactacaggcacccgccaccacgcccggctaattttttttttgtattttttagtagagacggggtttcatcgtgttagccaggatggtctcaatctcctgacctcatgatccgcctgcatcggcctcccaaagtgctgggattacaggcgtgagccaccgcgcccggccca

SEQ ID NO: 1355 - DNA, 4364 bp, Homo sapiens
tttttgtttttgagacggagtctcgctccgtcacccaggctggagtacagtggcacaatctcggcttactgcagcccatgcctcccaggttcaagcaattctcctgcctcagcctcccgagtagctgggattacaggcgcgttaccaccacgcccagctaatttttttatttttagtagagacggggtatcaccatgttggccaggctggtctcaaactcctgacctacagtgatctacctgcctcagcctcccaaagtgctgggattacaagcatgagccactgcgcccggccgagaaagaagtttaatggtaggataattaaagagatgggaggaaacctcaaatctatctccccaaggaatttgaggttagggttttaaagggttttggagtgggccaaagtgtggagattgttgattggttgaagagtgcaggatgaagtcataggacttggagatgaagaaactgtattcttggccaggttgatgcctataatcccaacactttgggagcccaaggcaggaggattgcttgagggaagtagttcaagaccagcctggctaacatagggagaccccatctctacaaaaaattttttaaaattagctgggtgtagtggtatctacctgtagccccagctactaaggaggctgaggctggaggattacttaagcccaggagtttgaggctttagtgagctatgattgtgccacttcactccagcctggctgaggagcaagactctatcttaaaaaaagaaacaagtatattcttgtgctgatttggttcctctctgagggtcttgaaactggttggcttcagcctttccactagaattcaggatcctgagaatatcttaagcagtctttaaacgaaagccttataattccaatgtcagagatcctatctataggaacaatgggaatgcaaatagtcagtatctagtactacatgactttcagcaaaaggaaagtgggccaaagggcagcctgattaatttttaactatatttctgtccagaacctggcatgcaattcatgtcaccccactggggatattttcagagttatatttatcgagtgacttgaccaaaaccaataagcccttaatggcttaactgtgggtataaggggtgtcttcatagagggtgcaaagatacagccctccccccaactgccaagatccagaaccactcccagagatagccaaaagacagagaatcctctgagagctggcaacagttggtaggaccctagatacaagtagggtgcaacccccatttctgtccggccatattattgggggctgccaacctttcagttggctgcctgcaaatacaggcttgataacctgtgtgcccggacaggtagaaagccaagctaagctttcaggacacgagaccaacaggaaagcaaaagctgtctctgagagggaaaggatcaagccagagtcataatccaaaaaaatcaattggtacagatgttttcctcctgctaatcaaagttagaaagtaaggagcaaagaaaagtgtttgccttcctcttctctactaggtgctacagacagatccaggagagttgactttggtaagaattcttacccttagccagcttctgtcagtttccccgggatctcattggcaggttccagagtgagcagggtaccccagagatcctatcctcatcaccagaaactctaggggaggaaagataattttctctctacccttcatagttgttaattgtgatggactcctgtaacaaaagatagattcacaagagaaaaacagtttaatagcttgtacagcagtccccccttatctgaggagagtatgttccaagacccctggtagatgcctgaaatcacggatagtaccagaccctatatatacattttttcctatacatacctatacttcatttataaattagacacagtaggagattaacaacaataaaataggacaattgtaacaatttgctagcattactactcttgtgctttggggccattgttaattaaaacaaagattacttgaacagaagcactgcagtactgcaacagttgatctgataaccaagatggctactaagtgactaatgggtggtatatacagtatggatgtgctgggcaaaggaatgatttgcatcttgggtgggatggagcaggacggcatgagattccatcatgctattcagaatggcatgcaatttgaaagttaggaattgtttatttctggaattttccatgtaatattcttggaccatgttgaccacaggtaactgtacccagggaaaacaaaactgcttataaggggggactattatatgcctcatgtatacatccaaccagggaaggatgagtaaatctccccttctgttgtatttgattgatttttttttgtagtataccgttttgattctcttctcatttccttttatgcatatcttttttttaaatagaagcaaagtatcactgtgttacccaggctagactagagctcctgggttcaagtgatcctccctcctcagcctcctgagtagctgggagtataggtgcacgccacctcgcctggcttattttcatatatatatcttttagggtttttttcttagtggttaccctggggattatgatgggcatcttaagtttacaactaactagtatgaattaatactaatttagcttcaatagtatatataaaaactgcttctatacagctctacctctcctcctttatgtagttattgtcccaaagtacatctttatatattgtgtgcctatttagagatgaaatctttctcagatttcttagtctgaaatagccaatgagacattcttaagttgaaagcaatataaatattggcacgagttgcttttagatattcaattgttttgtgttaatttaaaaatcccttctgtgcataaacgcattttcttttcattaactatatgtcagaagtttgtttcgttggtttgtttttgtttgagacagagtttcactctgtcacccaggctggagtgaagtggcgtgatcttgcctcactgcaacctccatctcctggattcaagctattctcctgtctcagtcacccgagtagctgggattacaggcatgcgccaccacgcctggctaatttttgtatttttggtagagacggtttcaccatgttgaccaggctggtctcgaactactgacctcaagtgatctgcccgcctcggcctccaaaagtgatgggattataggcgtgagccaccgcgcccagcctatgtgtcagaagttatttttttaaacatttggcagatagaattttttattaagtacaaagaaatttttcctttgttgatttgtttaaatcattggtgtgtgaatatcttgtgaaagcattttaaaaagtggtcataagattcttcaggccgggcgcggtggctcacgcctgtaatcccagcagtttaggaggccgaggtgggcggatcaccaggtcaggagttcaagaccagccttgccaacatagtgaaaccccgtctctactaaaaatacaaaaattagctaggcatggtggcgtgtgcctatagtcccagctactcgggagactgaggcaggagaatcgcttgaatccgggaggcggaggttgcagtaagctgagatcatgccactgcattccagcttgggtgacagtgtgagacttcttattaaaaaaaaaattatttgtaatggttaacattatacctaaaagggcagtatggaatttgctggatttttaaaagataacacaagtgagaagcaaagacaaattttcttagaatcaggcctacataatgaattagacttctgtcctaaaacacaagcagcaattcagactatggaattagcatctttcaaaggtttatttctaattcctctttgagttaaggattatgaggcagaaagataactgtataagcattttcctctttatctttcaaacatattaaatttttaacataatttatataatgttcaggaatttcaagtatcctacttaatatggttttttttttttttttttttttgagacggagtctcgctctgtcgcccaggctggagtgcagtggcgcgatctcggctcactgcaagctctgcctcccgggttcacgccattctcctgcctcagcctcccaagtagctgggactacaggcgcccgccactacgcccggctaattttttgtatttttagtagagacggggtttcaccgttttagccgggatggtctcgatctcctgacctcgtgatccacccgcctcggcctcccaaagtgctgggattacaggcgtgagccaccgcgcccggcccttaatatggttttgcatgtgattgttt

SEQ ID NO: 1356 - DNA, 4721 bp, Homo sapiens
ttatttatttatttgtttgtttgtttgtttgagacggagtctcgctcttttgcccaggccggagtgcagtggcgtgatctcggctcactgcaagctccacctcctgggttcacgccattctcctgcctcagcctcccgagtagctgggactacaggcgcccgccaccatgcccagataattttttgtatttttggtagagacggggtttcactgtgttatccaggatggtctggatctcctgacctcgtgatccgcccgccttggcctcccaaagtgctgggattacaggcgtgagccaccgtgcccggcctgttctttaaaaagaatattagattatattttctaaatgtgccaagtatctaagaatatattctttcacctcctgctgataagagttatacatttaaccttaagcaaatctgccaagattctatgtcatttatgctttgatttatgtgagtattaatgtagtttctgtgactattgtatggttatatataccctccacctagtaaaacagttccatattcctggaaatggtcttttacatcccacaaatgtagctggaaaggaataatataaatactaatggtttgagagacaactagtcttgacatgtcttggttgaatagtgttctataagcaacaatatatgaaatactagacacacccattaaaagtagaaaatacccactactgttctaaaattattctgcaagatctcaccaatgcaatgagacataaaacagaaataatgggtgtaattattgaaaattggagataaaatttttattacttgcaaacaaaattctctgtgtcaaaaacctgataaattaaacaatacaattaatatgtttaatagaactaattacatatgagaggcatccaaaatccattttttctatacaaacatggtttgatatacacagtcttgttttatctgtgtattaattggttgatgaaataataaatggaaaaatcaagtatgcattatcaggttaaagaagcaggagagacagagccataaaaacaaagagagaagaatgttgtaaggagggcttaacgaccaggataaatgttgtagagagatcaattaaagtgatggcctagagatcacaggcttcctttggcagagccatgttggtgaagtgaaggaagtggaagccagaccacaatggttgaagaatgaatgtaatgtaagagccaagacatttatttgagtttgatagtaatgaaaaaggacgagaattttcttcttgctgttgtttttgtcatttcatgttcaaaaccctttatctcccatgtgggactgaaaactccaagatgggatctctgtttctgtgaggcctgtagtgcttagtacatccttgaatgtgtgaggctctcattggtataagtttaattcctgactgtggatgaaagctttaaaactttgcgggcaaaatacagaatgaatttcagtgagttcccatgtattaaacaaggtggcgctggctggagacatgctgtccctgtgcccacaggagtagcagtgctgtgctcatcttcctgacccgctcttcacagtcttcaccgcctttcttcaggagtctcccctttggcttttccacagctatgaaacccacgtagtcggacaccctgatgcttctcctgcagggcgtgtgatgaggaggtgagcttggctttggagtgctgggaacctgaggaattgccaaggacccagagcccagccctgaccacccagagagcccaaaacacaatgaacaaattgaatttccacaacagagtcatgcaagaccgccgcagcgtgtgcattttccttcccaatgatgaatctctgaacatcatcataaatgtgagtagatctcaatataattctgatagctggaggatagtgtattttcaggtttgctggaggaaaaaaactggactttaaataattaagacaaaatgattgtattaattgacttctatgcttaatcactaatttcactttttatatttcccttgacttttgggggagaaatagtctttgtctcaaaagtgggcttcagtgacctatgggtctgatgaagcaaccagggataatgagacaaggatatttaatggcaacatgccagcaattattattagttaattgaaagcgtttatgattttggcctggggccaatgctttccccctctgctgggctaacatgtgggtaagggagaggaaaagctttgtttcactttttaaataaaagtattacgtaactttgaaatttgtataaaattaaaagatagtaaaaacaactattctaacagaattcaaaacctgttatgcttcagtggagagattattcaagataagtccgtgggaaattgggagtacatttctactggcaaagttagtgataactatgcacttctgacaaaatgtgaaatggggggtatgggcgtgtcatatcatcatggtgcagatacgtggatgtgtgcttccaaacaatggcaacctaactgactgctggaaccatacaaaatacctgaaactactcagaaagaaggtgaaaattgcatgcaaaaattatttgaaaaatattgagctaacacaacatgaattttgaattataagtgaggtattgtaactcacctacagatgtgttttttgtaatcaatattcatggactcagactacacagtaaaagcttacatagaaatcattctatctaaactttctggatatgaaagtaacttactatgtgttttgctactatatctttatatgaatttaaatcacatttccaagtggcttacagtaatcaaggttaatttgtcacaaggaagatgcaaattaaaaccacattgcaatatcactgcacacccactagtacggtttaaaagaaaaaaaaacaaaatatcaagtattggtgaaaatgtggagcaaacagaactctttttcaataatggcgggtatgtaaagtggcacaaacactttggaaacctgtttggcattataccatactaaacctgaacacatgcattgtttatgacccaggaatgcccctcctgggaaccaacaacaacgcatatatgtgttgcatatgttcaccaaaagacatttacaagaatgttcatagcagcactatttgaaattgcccccaagtagaagatgcacaaatatttaacagtagttagataaagtgtggtacgtttatgcaatataataccatatagaaacgagagtgagggatctgcaaactaatatgcaactgtacaaatgaatcccacaaatataatgttgggtggcagaagccagatgcaaatgaatacatgctgtagatttcattcttttacattaaaaaagctagtcacacaaagttatgctgttagaagagagtgatttggtcgggcgcaggggtagttacaggaagggagtacacggagatttctggttgttagttatgttcagtgtcaatctaggtgctaaacaggtacaataaagattttagaattcatcaatttgcacacttatgatagatgcactttcctgtatgtatatttcaatacaatcttttaaaaagtaaaatgacaaaaagacactattaacaaaaatgacatattacattaactgttatactaaggaaaatataaaaatgagttctataacaggggctctgcaggtcatgtggtcatgccaaggaccatatgtgctcaagattctcatgacattttggaaggaggttgggctttctttatctttcctttcttctctcccttcccttcccttccctatttttaaacctaggtttggtattttcctggggtgatggtgactttggaaaattgggccggggcggaagtgaaggctgcaacattccccagaacattgagagactaaatggacagggggtgtgccagattgagtgtggagctcagttcctactggcgctcaccaagtctggagtggtgtggacatggtacgtaaacgtcctccccatcacagtgtgcgtgcttgtgccggtgcgtgcagggaacttgggcctcgccccaggaccaccccggcgtgattgtgacctgtcatatttttacttatgcatgcatctttgtcctttaaaggatattgagtcgggattagtgacaatagtacaagaagaaatttcctattgtaactgggtcattttgaaaatactagaaaaattttaggccacttacctttcctgtttgggcgagatttataggaagtgtttcttctgctgaagcctaaggataaaatgagagcaaaatagccttctgaatcctttgatcctgagaaagttaacatgtatttcttgttaaagcttattatattaatgtgcaaaagagcaggtgcccagactggccttggatgctgtgtcaggccttgctgcctctggtcataacattggcactatttatttatttatttatttgagatggagtctcgctctatcgcccaggctggaatgcagtggcacaatctcagctcattgcaagctccgcctccggggttcacaccattctcctgcctcagcctcccgagtagctgggactacaggtgtctgccaccatgcccggctaatttttttgtatttttagtagagatggggtttcaccgtgttagccaggatggtctcaatctcctgacctcgtgatccacccacctcagcctcccaaagtgctgggattacaggcgtgaaccaccgcgactggccaacattggcac

SEQ ID NO: 1357 - DNA, 5635 bp, Homo sapiens
taacattttaaaaattgctgtattcaaaattaataataaactttggggtaaataagctttaaaacaaaagtacataagcaaaaataaataatttacaccaacccactaacctaattttcagagtaaagccatttccaattacagtactgttatcccgggcaccagcctgtggttaaactttgatgattcattatttttaaaaaacagtaataaaaattgaatactaagcaaaatctttaacaaaaccactggatttaactttttaattttaaataaccaaattttataattttgtacataattcaatgtaatgccaatataattagcatttcagcttgaagagctggtttttaacagggatgggaaactataaattattcaaacagtctgcaaaccatgagatacaaataaaaatggacaagcatatagtagaacaaaaaccgcagacactctactaactggggaaatatctgaaggctttacaccctttattatccataatggcttttggaattacgattgtgtgacatatagaacctttgatattttagatacagcctttatttttttttccacgggaagttaaaaatccatcataagactccataagactttactagtcttgcatgtagactctaggagtttgtgatctgataaaagagtaacatgaaaatttactgtattgccctaatttcatacttccttgtacacaatgaatcactctgagaatctattccaagggttatatacacaaaagtgtcaagaataaaatgttctccactctcgcataaaaatgtgtacagtgtatcaggaatggaaaacttctaattttcctgggcccgggcttcatggatttctgctgccagaagatgaaagactccttctgctttattgctccattgttctgaggattaatcatccaaccctggcgtttctccttgttggattctagacgctattctgatggcttcttccagagatggctgttctccaagctgaaacaggaacacacacatcaaacgctaacaattcaaaagccacagtcaagaaaatgccaaagaaatgttatatgccagaagtgaaacttctctctgtaattctgacacttgggattgttaaaatactactgctaactcaaacattaagagaacaaaacaatttcctgcaggggagaataatgcaatgcaatttctttttcttttttgaatttcaaatcctatgtgcagccaggcctggtgatatgatgaggtctcagcggggcatggtggcccatgcctgtaatcccaacactttgggaggtggaggcaggcagattgcttgagcccaggagttcgagaccagcctgagcaacatggcaaaacgccccatctctactaaaaaaatacaaaaattggctgggcgcggtggctcacgcctgtaatctcagcacttcgggaggccgaggcgggcagatcacgaggtcaggagattgagaccatcctggctaacacagtgaaaccccatttcatttctactaaaaaatacaaaaaaaaaattgctgggcgtggtgatgggtgcctgtagtcccagctactggggaggctgagggaggagaatggcatgaacccaggaggcggagcttgcagtgagccaagatggtgccactgcactccagcctgggtgacagagcgagactccgtctcaaaaaacaaaaattagctgcgcatggcagcgtgcacctgtactcccagcctgccgtgcctggcctgcaatttacttgggattttgataaaatcttcatacagtctggccatggtggctcatgactataatcgtagcactttgggaggctgaggcaggaggatcacttgagcccaggagttcaagaccagcctgagcaacatagtgagaccccatctctatttatttttacataaataaaaactaaaaaaaaaaaaaattcatacatgcaagagacaaaagatgcttacctcagccaacaaaagagagcttcttgagcctttagcttctatacccataaactacataaagccaacagctgacatttcctggagtgtgttctaactctttatcaagtaaacacgtgggcggaaaaaaaatctccctaaggacaggtaatctgcacctagcccctaggattctattttactttacattctaattttttttttgagacagggtctcgctctgttgcccaggctggagtacagtggtgcgatcttggctcactgcagcctcaacctcccttgctcaagtgatccttccacctcagccacctgagtagctgggactacaggtgcacaccaccacacctggctaatttttgtatttttgtagagatggggtttcgtcatgttgcctgggctggtctcttattttttgagatggggtctcatttgttacccaggcgggagtgcagtggcacaatcttggctcactgcagcctcaaatctcctgggtacaagtaatcctcctgcctcagcaccccccaagtagctgggcactacaggcagccgtcaccacacccagctaatttttgtgttttttgtagtgatggttttcaccatgttgcccaggctggtctctaattcctaagctcaagctacctacctgtctcagcctcccaaagtgctaggattatagggatgagccaccatgcccggctgcacctaagattctaaattctctgcttcccagagaatgattccttctaagtcttctgacattccccactttaaaatgggggctgtgcaaggattctcagaggacttatttaggatttgtgtttccactaggtttttctctaaggagtagctcttaagtgctttacagacccctgcctaattagacttttattttgagagtaaagatgcctgggtgggtgcacacagggatatatacctgaaggttttttttcttgctataaattcccctagaatatgcaaagatgggtagagaacaaagtgctggtctttttgagtccacctcaaatacaccgatttccttaaagtaggctaggtgatagagattattctacaccttgcctcctgtaaaggttatacacgaagcacagtgtacaaagttgaaagctatgagcagcactgctgtcgactgaggacagtatgccttggtactcacctgaactgcaatctgggtgccattggatgttgctactaaggtcagaggtctggtttctgtggttactaagtgatggctatgctgctggtgccccatttctgatgaggcagtatggaatgctgccaagtcttgagctacaattgcaaccttaagcaaaacaaaacaaaccatacacataaagaattaaacctgcgatttaaataggttaaagtccacttaatacaatggatttcttcaaattgaaaaggaaaaactcctctgaccatagacttgtcaaagcctatattgaaaggaggtttatttgaggaagttgaggctcattatctaaggttatgaagtgagccaacggcaaaatagggtagagaacactggagaaatggatctgctatgccaggccccattagccagggagatgtggctgtacctagattctattacccctaagtgactgcttgggaagttatgtatgtggactaatttgcacctcaaatgtccatttttttttcctgagattggctcataggagaaaataaatgatttttttcctctttacttgtcgtatttaaaattagatttccatttaactaggaaaactgaaaggaccagtggtactactgacaaacagcatctcatctcatactcatttcccattttagactccatggaatcttcccatactcctcttgcagcatctagccaggaggattaaaagggcttttgtggctcttataccacaagtacaactttttaaaaaaatgcagataacatggaaaatggcaattaactatttctgttagatgatattctaaaattttactcagccaaattcagagaaagaatagattaaaaatgaaaactgctgttttacttggctattcatccactaaaaatgctacattttaagctaatagatatttagcttggatcaatcccaataatgttccctaattctataagaaaaacagatttcattccagcaatgtctaagtagcttatattgggctaaccttcctgcagataacaattataaacccttgacaaaaatatgaaaaagcaactatatgaaggctttgaggagcaatgacaagcaggaagaaactagaggggattctcaaaagaagggagtcacactgtgttatatctgtgtttaaatagatttcacactgagggcactacccagtttgagcagcctggggcaacttaaggttaaagataatggagtccagggctgccagaatagcagtacagagaagaatagcccagaaagcaaagaatttgagtgggaagcccccaaatctttgtataaactgtcctcaaatcctttttttttttttttttttttgaggtagtctcgctctgtcgcccaagctggaatgcaatggcttgatctcagctcactgcaaactctgcctcccaggttcaagcgattcttctgcctcagcctcccgagtagctgggattacaggcatgcggcacctcactcggctaatttttgtatttttagtagaaacagggtttctccaagttggtcaggctggtctcgaactcctgacctcaggcgatccacccgcctcggcctcccaaagcgctgggattacagacgtgagcccccgcgcccagccagaataataattattattattatatattttttgagacggagtctcactttgtcgcccaggctggagtgcagtggcgccgtcttggctcactgcaagctccgcctcccgggttcacgccattctcctgcctcagcctcccgagtagctgggattacaggcgcccgccatcacgcccagctaattttttgtattttttagtagagacggggtttcaccgtgttagccaggatggtctcgatctcctgacctcgtgatccgcccgcctcagcctcccaaagtgctgggattacaggcgtgagccaccgcgcccggcctcaaatccttaagacccctcaacacaaatatttccggtttccgacaacattccaacaagactggcaaagcagcatctagaaggctgagaaactaaggagagctttcagtgcaactcaccaaagagagacggaatttgaagtttcaatcttaccaagttaggaggtaagattacgtcccaggactaaatattcaccctaagaccttatagcaacactgaaacagacctgccttaacaaagtacaaaacccagccacaacacgtaatttaactagctaatagaaaaaaaaaatcaatattctccagagaaagataacaaaattcagaatctctataatgtgtcatccacaaggtccagaatgcaattttaaaattacaattgcttagccaggcatgatggctcacgcttgtaatcctagcactttgggaggccgaggtgggtggatcacctgaggtcaggagttcgagatcagcctggccaacatggtgaaagcccacctctactaaaaaaaaaaatacaaaaaattagctgggcatggtggcgggtgcctgtagtcccagct

SEQ ID NO: 1358 - DNA, 209 bp, Homo sapiens
ttcacgccattctcctgcttcagcctcccaagtagctgggactacaggcgtccgacaccatgcccagctaatttttttgtatttcttagtagagacgggtttcaccgtgttagccaggatggtctcgatctcctgacctcgtgatccgcccgcctcagcctcccaaagtcctgggattacaggcatgagccaccgtgcccggcccaaaa

SEQ ID NO: 1359 - DNA, 139 bp, Homo sapiens
ttttttttgtatttttagtaggcacggggtttcaccatgttagccaggatggtctcgatctcctgaccttgtgatccacccgcctcagcctcccgaagtactgggattacaggcgtgagccaccgcgcccggcctaaaa

SEQ ID NO: 1360 - DNA, 108 bp, Homo sapiens
gggtttcactgtgttagccaggatggtctcaatctcctgacctcgtgttccactcacctcagcctcccaaagtactgggattacaagcgtgagccaccgcgcctggcc

SEQ ID NO: 1361 - DNA, 138 bp, Homo sapiens
tttttttttgtatttttagtagagacggtgtttcaccgtgttagccaggatggtctcaatctcctgaccttgtgaaccaccctcctcagcctcccaacgtgctggaattacaggcgtgagccaccgtgcctggcccaa

SEQ ID NO: 1362 - DNA, 323 bp, Homo sapiens
attttttttttcttttttttggagacggggtctcattctgtcacccaggctggggtgcagtggcacaatctcggctcacggcaagctctgcctcccgggttcacgccattctcctgcctcagcctcccgagtagctgggactacaggcgcccgccaccacgcccggctaattttttgtatttttagtagagacggggtttcaccgtgttagccaggatggtctcaatctcctgacctcgtgatccgcctgcctcggcctcccaaagtgctgggattacaggcgtgagccaccgcgcctggccaacaatttttttttttttttt

SEQ ID NO: 1363 - DNA, 358 bp, Homo sapiens
ttttttttttttttttttttttttttttgagacagagtctcgctctgttgcccaggctggagtgcagtggcatgatcttggctcactgcaagctccgcctcctgggttcacgccaggagttcacatgggttcacaccaggagttcacacctgggttcacgcctacctcagcctcccgagtagctgggactacaggtggccgccaccacgcccggctaattttttgtatttttagtagagacggggtttcaccgtgttagccaggatggtctcgatctcctgacctcgtgatccacccgcctcggcctcccaaagtgctgggattacaggcgatgagccaccgtgcccggccaggaatc

SEQ ID NO: 1364 - DNA, 427 bp, Homo sapiens
gaatttgtctaattcctttttttttttttttttgagacggagtctcgctctgtggcccaggcgggagtgcagtggcgcaatctcggctcactgcaagctccgcctccagggttcacgccattctcctgcctcagcctcccgagtagctgggactacaggtgcccaccatcacgcccggctaattttttttgtatttttagtagagacggggtttcaccgtgttagccaggatggtctcgatctcctgacctcgtgatccgcccgcctcggcctcccaaagtgctgggattacaagcgtgagccaccgcgcccggccgagaatttgtctaattcagatactcccaaataagcagatcattttgtatgtaaaatggaaatatgtccattctgttctgtgacataatataacttgatgaatctgagtctt

SEQ ID NO: 1365 - DNA, 549 bp, Homo sapiens
gctcactgcaagctccgcctcccaggttcacgccattctcctgcctcagcctctggagtagctgggactacaggtgcccgccaccacgcccagataatttttttttttttgtattttttagtagagatggggtttcaccgtgttagccaggatggtctcaatctcctgaccttgtgatccacccgcctcagcctcccaaagtgctgggattacaggcgagagccaccgcgcctggcccaaaataagaattttttttttttttttgagatggagtcttgctctgttgcccaggctggagtgcagtggtgcgatctcggctcactgcaagctccacctcccaggttcacgccattctcctgcctcagcctcccgagttgctgggactacaggcgcccaccaccatgcctggctaattttttgtatttttagtagagatgtggtttcaccatgttagccaggatggtctcgatctcctgacccgtgatctgcccgcctcggcctcccaaagtgctgggattacaggcgtgagccaccacacctggcccaaaa

SEQ ID NO: 1366 - DNA, 5059 bp, Homo sapiens
gagaatctttttctttttttttctttttttgagacggagtctcgctctgtcgccgaggctggagtgcagtggcgcaatctcggctcactgcaagctccgcctcccaggctcccgccattctcatgcctcaggctcccgaatagctgggactacaggcacccaccaccacacccggctaattttttgtatttttagtagagacggggtttcaccgtgttagccaggatggtctcaatctcctgacctcgtgatccgcccgcctccgcctcccaaagtgctgggattacaggcatgagccaccgcgcccggccgagagtctttaattttctactttgtatatttctatattaactttgaaagaacacccatttattaccttttaactagtaaaagcaataaaaataagaaaagttaatactatcatagtaatactattgttgtcattccaagaaaaaaatatattaaaaatatttatttgaaaaaataaataaataaaaataaaaatgagattgaaaggaatggccagagaagtaagacaaagaagaggcatgatgggtcacagaagtcaatgtatcgaagtatttcaaggagtatttcttgtcatattttgcttgacaggtcaagtgagatgaggactaaaagtatccattggatttagtgatttgatagtcattggtgaccttatcaccacaaactgaggaagtcagattagagtgtgttatattaataagggagtaagaagaaggaaatggaaaaagaatagttatgtcaagaagtttggctacaacagatagaagggtgttaggtggtagctagagagggatgtgaactcaagggaaattatttttgtaagactggagaaactagagcatatttaaatgtcaataaaaacatgtcaatgaggccagatgcagtggctcacgcctgtaatcccagcactttgggcgggtggatcacctgaggtcaggagttcaagaacagcctggccaacgtggtgaaacctcgtctctactaaaaatacaaaaattagctgggtatggtggcgggcacctgtaatcccagctactcgggaggctgaggcaggagaatcgcttgaacccaggaggtggaggttgcagtgagccaagatcctgccattgcactccagcctgggcaacaagagaaaaactccgtctcaaaaaaaaaaaaaaaaaaaaaaaactcaatgagcgggaattgttgaataaacaggagagagaagggataattaatagtggaaggtttctgggaaggtgtgaggggatagcatacagtaggaagaaatgagaagtataaaaggaggtagggagaggatttgttctaatgtgagcaaatatgtagatttgatggtgggaaatgggggattaaatgagataatgcatgcaaagcacttagcatagtgcctggcacagttagtttgtatcagaaatggtaactatggctattgttgtttttcatgtcatacacctgcttgaaaatttctcaccttttaggctttgtccatgtgaaatgagctagtaccctactttattaatgctataaatttcaatttttatttttttgagacagagtctagctctgttgcccaggctggagtgcagtggcatgatcttggctcactgcaacctccacttcccggtttcaggtgattctcctgcctcagcctcctgagtagctgggattacaggtgcccaccattatgcccggctaaattttgtatttttactagaggagaggtttcaccacgttggccaggctggtctcgaactcctggcctcaagtgatctgcccaccttggcctcccaaagtgctgggattacaggtgagagccaccgcacttgactttcaaattttctatattgaatttatatacaacgagggttacttgaacttttgttttgttttgttttatttttatttttatttttggagacggagtctcactctgtcgcccaggctggagtgcagtggcatgatctcggctcactgcaagctccgcctcccaggttcacgccattctcctgcctcagcctccccgagtagctgggactacaggtacccaccaccacgcccaactaatttttgtttttgtatttttagtagagatggggtttcaccgtgttagccaggatggtcacgatttcctgacctcgtgatccacctgcctcagcctcccaaagtgctgggattataggcgtgagtcaccacacctggccgagggttacttgaacttttgattcctcacctctgttctcttcagaacttctggatatttgctggttccctgattttgataagaagaaaaaagttgtacatttaagattaatgggctgggtgcagtgggtcacacatgtaaccccagcactttgggaggccaaggcaggcgaattacttgaggtcaggagttcaagaccagtctggccaacatggtgaaacttcatctctactaaaaatacaaaaattagccggtcgttgttgcgtgtgtctgtaacccagcactttgggatgctgaggcgggcagatcgcttgagtccaggagttcaagaccagtctggccaacatggcaaaaccccatctctacaaaaaatacaaaaattaggcagttgtggtggcgtgtgcctgtggtcccagctactcgggaggctgaggtgagaggatcacttgagtctgggagatgaatgttgcagtgagccaagatggcaccactgcactccagactggatgatagagcaagacaccatttcaacaacaacaacaacaaaaaaaaaaaaaaaaaaaaaaagagagagagagatcactcctcactcctccctcctcctctgattaagaatctacatttgaggctgggtgctgtggctcacacttgtaatcccagcactttagggggccaaggcgggtggatcacaaggtcaggagttcaagagcagtccggccaagctggtgaaaccccgtctctactaaaaatacaaaaaattactcgggtttggtggcgggtgcctgtaatcccagctactcgggagactgaggtaggagaatcacttgaacccgggaggcagaggttgcggtgagctgagattgcaccattgcactccagcctgggcaacaagagtgaaactccgtctcatagatagatagatagttagatagatagataaatagatagatagatagatagatagatagatagatagatagatagaatctacatttggccgggtgcaatggctcacacctgtaatcccaacactttgggaggctgagctgggaggattgcttgaggccagaagtttgagaccagcctgggaaacagcaaaatccggcctctactaaaaatacaaaaaattagccaggcatggtggcgcacgcctgtagtcccagcttctcaggaggctgaggtgggaggattgcttgagccggggaggtcacagctgcagtgagccatgatcatgctactgcactccagcctgggtgacagagtaaaactctgcttcaaaaaaaaaaaaaaaaaaaaagaattggctgggcatggtggctcacacctataatcccaacactttgggagaccgaggtgggcagatcacttgaggctaggagtttgagactagcctgaccaacatggcaaaaccccgtctctactaaaaatataaaaattagccgggcatggtggtgcatgcctgtagtcccagctaatcgtgagggtaaggcagagaatcgcttgaacctgggagacagaggttgcagtgagccaagactgcggccgctgtgtgcctgggagacagagcgagaccctgtctttaaaaaaaaaacaaaaaagagaatctacattctttttttttttatttaaaggcctataatgcccttttaactctctttttaaatcattttcaaaatccttgacctagaattttaggttcctgttaatctagccacactccatttaactttttcatcttctttcttcaacataacctctgacatgttaccactgcttacaaatagaaagaggactaagcttggagagactctgaagagaagcatttactttttactctacatacttctgcatttaatttttttacagtgataatgtactacatttggaatttaaaatgaaacacaataaataaattaaaacaacttttgccctagtatcactctccctaatctttcatacccatcaaaattaatttctcattattcagatttccattcaaatgtacaggtgacacttgaacaagggttttaactgcatgggtccacttatatgtggattttcttctgcctctgctacccctgagatagcaagaccaacccctcatcttcctcctcctcctcctcagcctactcaatatgaagacagtgatgaagaactttatgataatccacttccgcttaatgaataatgcatatattttcccttccttattttattttattttatttttagacaaggtctcactctgttgcctaggctggagtgcattgcgacaatcatggcttactgcagcttcgatctcctgggctcaggtgatcctcccaccttaccttcccaagtagctgggactacaggtgtgcgctactatgactggctaatttttttgtatgtttttgtagagagggggttttgtcatgttgtacaggctggtcttgaactggacacaagtaatctgcccacctcggccacccaaagtgctaggattacacgcatgagccacctcacccagccccttatgattttcctttttttttttttttttgagacgcagtcttgttctgtcgcccaggctggagtgcagtggcacaatctcggctcactgcaagctccgcctcccgggttcacaccattctcctgcctcagcctcccgagtagctgggactacaggcgcctgccactacgcccagctaatttgtgttttttttgtatttttagtagagacggggtttcaccgtgttagccaggatggtctcgatctcctgacctcgtgatccgcccgtcttggcctcccaaagtgctgggattacaggcgtgagcaaccatgcc

SEQ ID NO: 1367 - DNA, 129 bp, Homo sapiens
tttttttttgtatttttagtagagacagggtttcaccgtgttagccaggatggtctcgatctcctgaccttgtgatccgccagccttggcctcccaaagtgctgggattacaggcgtgagccaccgcac

SEQ ID NO: 1368 - DNA, 1939 bp, Homo sapiens
ccaagtaggttcccctgtaacctcctacaaagcaatattccaaaggaacattttaactgtaaaggctggagacaagaaaaaataagtagatcgttttaataacaattatttaattgcctataagtttgctgtttcagaggctagcccaaaggcatcaaatttaataaagttaaacaaattgatttacttcagagcaaatatgatcctattaaaataatatagggtaaataccctacctcttagaaagggcaaaaatgcaaagaagctttctttaaaactaaaagggttttttggggggggagttggcggggaggaaataaggctaacagaggttgacctaaaattagccttacaaaggagaaaggaccacattgcttacttgaaacagacaatgaaaacaaccaaagtgatatataaaatagttgatgagaactagacttatgactgtagtttactagagtttagttttcagttgctgaagtagctcattttctcttactaatgtttggttcctcagggaagaatctcacttgactagagaggaggtgggaacagaagagagaaggaggcagggagatgtatttcttagggctcaccccttcacagactgacagaatggttttgttttgttttgttttgttttgttttgtttttgagatggactctagctctgtcacccaggctggagtgcagtggtgcgatctcggctcactgcaagctccgcctcccgggttctcaccattctcctgcctcagcctcccgagtagctgggactacaggcgcccaccaccacgcccggctaattttttgtattttttagtagagacggggtttcaccatgttagccaggatggtctcgatctcctgacctcgtgatccgcccgcctcggcctcccaaagtgctgggattacaggcgtgagccaccgtgcctgccccagaatggtttttaaagccacagttgagaggccacccattgcccggcgcctggacagtgatcatcttgttcatcttgttcagtcctttcttgtgtgattggaattattcatcccctttgaaagatgagaaggttgagatgcaaagagtctacctttccaagttctcactgctggaaagagctagaagcacagttcaaagttctggcttctggactctgcagtccaggtctcccttctcccacttgcctaccctcaatgccacactgtttttgaagtggcccataacttgaaggaaaagtttaaagacagttcaatttaatcatcagaatgcattcttttttttttcggagacggagtttcactcttgctgcccaggctggagtgcaatggtgcaatgacctcggctcactgcaacctctgcctcctgggttcaagtgattctccagcctcagcctcccgagtagctgggattatgggcgcccaccaccatgcccagctaatttttgtattttttttttttagtagagatggggtttcgccaggttggccaggctggtcttgtgaactcctggcctcaggtgatctgcccacctcatcctccaaaagtgctgggattacaggcatgagccactgcgcctggcctcagaatgcattcttacacatctatcctagacatttataagcactctaatggataacaatccaagaataaatgattgtaaaagatgatgccgaagagttgatgtcaatctttttttcctaagaaaaaaagtccgcgagtattaaatatttagatcaatgtttataaaatgattactttgtatatctcattattcctattttggaataaaaactgaccttctttaatcatatacttgtcttttgtaaatagcagcttttgtgtcattctccccactttattagttaatttaaattggaaaaaaccctcaaactaatattcttgtctgttccagtcttataaataaaacttataatgcatgta

SEQ ID NO: 1369 - DNA, 139 bp, Homo sapiens
ttttttttgtgtatttttagtagagacggggtttcaccgtgttagccaggatggtctcgatctcctgacctcgtgatcacccgcctcggcgtcccaaagtgctgggattacaggcgtgagccaccgtgcctggccgaaa

SEQ ID NO: 1370 - DNA, 47567 bp, Homo sapiens; identical to SEQ ID NO: 1325

SEQ ID NO: 1371 - DNA, 141 bp, Homo sapiens
ttttttttttgtatttttttagtagagatggggtttcatcctgttagccaggatggtcttgatctcctgaccttgtgatccacccgcctcagcctcccaaagtgctgggattacaggcatagccaccgcgcctggccctaa

SEQ ID NO: 1372 - DNA, 54877 bp, Homo sapiens
acaaatgagaaagtttcatttacctcaaaaaaatccaggctatacaaacagacaactgaaagccacataggaaatttccgaaacacaaaagaaaaagtctcacctacaagattatttacatgtttagggccagtattattaaaagacgtcatcccctaggtctagtagaaacatatagagaagtctatgctaacacacttggaaagaggactattgtccttccttgcacatgacaaaaaccaaatgaaccaaacccctagaaggtattaatgcacaaaggttttaataccttggctttaatgatttttcaaggttaagaaacaaattcaaattggttggagcttcaactcagtaattacaatcacaatgcatctctgaaaggccctgcatttggaggcagagtaatctgcaaagatgatagtttttacatatgtcctgttacctacaccaatataattactacattatcttataaagacaaacagttgcttcaaactctttaaaaaatatatatataatgagtttcccaaagactcgagtctatattcaaagatgagtaaaaaaaaatccattacttccctagggtcactttcttcctttactcctgcttaaatgcaaaagctgatagtttctgatttgtagaaaaatctaaaggtttctgctttttagacaaattcaggttctcttttgctttttcttcctggttttctgtttcatcactttcatcaaccacacgttttcgcttctttgcttcagttccttcacttgccgtttctcctttggctttgttagcccacacctttgtaaaatggcaggagtgaaaaggaaagatttttagaaaataacaaataagaagtaaatgatttatttacttttccaggtaatatttttatatataaagcagaataattagcacttgaattaagtgttctcattgttaacaaatcttttattacttaaatgcagagcacattaaagatttacactacttttatatctcaatctaagctttgcttatattaatcatattagttgcaaaatactataattgcagtactatttaaaaatgaaacttttggccaggcacggtggctcatgtctgtaatcccagcactttgggaggccgaggtgggtggatcacggggtcaggagactgagaccatcctggctaacacagtgaaaccccgtctctactaaaaatacaaaaaaattagccgggcatggtagcgggcgcctgtagtcccagctacttgggaggctgaggcaggagactagagtgaacccgggaggtggagcctgcagtgagctgagatcacgccactgcactccagcctgggcgagagcaagactccgtctcaaaaaataaataaataaataaataaataaataataaaaatgaaactttttattctaagataattgcagtttcacatgcagttgtatgaaataatacagaaagatcctgtgtagccttcacccagttttccccagtggtaacattttgcaaaactatagcccaacaatcacaactatagggaactgacattgaaacaatcccattttacttctactcatttgagcgtatgtatgtatttacttttattgtgggttggtttgtttaccaccacagtcaaaatacagaacctcttccccaagccccaactccgactccaacccctggcaaccactactctattctccatcttgatcatgttgtcatttcaggaatgttatataaatgagtatatattctttggggtttggtttttattcactcagcaagagccagacaaggtccattcatttcatctgtctctaaaatctcttttaatctataatagttccccactcctactttatttccctggccatttcaagggctcttcaagctgtagaatttctcacattaacaaactggatttaagtaaatgtttagggtttaccttaaaaatactgattacatttttaagtattcaaaaacacaatcacagactttgccaagtctcttcctcttttgcagtgtaaagtcttatttatttagacgccattttattgaacaacaaatgagaaacataaaattgtaaatgaggttctaaatgacgctaaaggtgtttaaaccagtttctggcttcctcattatgcaacacctttttcataaaacccaatttaccaaagcaagtatctacgttactaggtgcctgtgctgcgccctgccattcctggggaagtgaaacctgaggatttaactggtacaccacacacattccttccacttctaactgagagattgtgccttccttccttcacatggcagaagtttatcagaagcaagccagccacctgtcctaatttccatgtgaaaggctggaacagaacaccagtctttttcccaaaaggaatagtctcatgtagtatttaatgtgtaagtagatacaatttttaaaaattctgcttgcaagaaccctaaagtagtattcaaaaaatgtgaattcatttttacttattaatttttttccccctagagacccggtctcactctgtcacccatgctggagtacagtgacacaatcacggctcactgcagccttgacctcctgggctcaagtaagtgatcttcccacctcaacctcctgagtaactgggactacaggtgtgtgccaccatgccaggctaatttttaaatttttgtagagatggtgtatcactatgttgtctaggctggtctcaaactcctgggctcaagagatcctcctgccttggcctcccaaagtgctaggattacaggcttgagccaacgaactcagcttgacacttttgatttttaacaaatgcatcttttcttggggtattctcctaacttaaaacatacaggaacttatagagattaaaacagtaaaccgtcaaaaaattaaccatccagcctgggcaacacagtgagaggttgtctctataaaaaaaaaaaagaggacaattgcttgtgcccaggaggtcgaggtggcagtgagccatgatcacaccacgacactcctgcctgggtgaaagaacaagacctgcctcaaacaaaaacaaaacaaaaaacccatcaccattacataataattactacatatccatattaccatatatccgcacttactttcctctttaaaaagtttggtggatgtattcaatttccaaaaacagaaaaaggcttttccttttttttttagttgtcatgatcgttattatctttgttgttgttattattattattagagacgatgtctcactatgttgcccaggctggtcacgaactcctgagctcaagtgatccgcctcgacctcccaatgtgctaggattacaggcataagacaccatacccagccaaaaggcatttctataagaattttttaaatctgggaattcactaagatctcaatctcggcacaattatccttacctttctttcttcagttgacaatactctaaatcgaatcattccttcttttattatgtctgcttcatctgaaaagtcaggattgtcagacaaaatattacttctattttcttctaaccacatctggaacccggtctttggcctaaaatcacaattatgtgaaaacattttatacttaagacagagtttaaagtgcctcatgattttaagttagtaatcaaccataagtctctgacatctattatataaagtaaggaagacacagttacacttgttaattcatgttactttttttttttttttttttttgagacagagtctcactctgtcacccagcctggagtgcaatggcgcgatctcagctcactgcaacctccgcctcctgggttcaagcgattctcctgcctcagcctcccaagtagctgggattacaggcatgcgccaccacacctggctaattttttgcatggggtttcaccatgttggtcaggctggtctcaaactcctgacctcacgtgatctgcccgcctcggcttcccaaactgctgggattacaggcataagccaccgtgcctggcctcatattactttaaactgcctggagactgcaggatcaatgaactggaaaatcctttgtaaggtcaattcaaaaggatcactcacgtttgtattttccaagtgcagcaaccatgaactctgtactttcaactttttaatgaatgttgacaggctcaaggtctccaacctcacttagcccttgtggcctaccacatgtccttggtaggctctttttctatttccccaaaccagctatttgaattcctcacgacttttctcaagcccctttgccatcgcctcacccttgctctcagagctgacctgcatcagcattaggtgaagcacggacacagcacatttgtacatttcattagattccactcacaatacaaattgtctttaagtcacacaagtgaaggtttaatgcaaatatttaacatttactgatcacttactatctaccaggcactactctaaaagctttatgtatagtacctcatttaaatgacaataacactatgagatggatacagttattatctccattccataagtgagaaaagggaggctcagagatgtgaaataacctatcccaggttacacaaacagtaaaactcagacctgggatccaacaaccaggcaatttgactccaaagtctatgtttttttgtagagatggagtctagctctttcccctatgctggagtacagtggctctgtattggcttactgcaacctccaccttccaggttcaagtgattctcctgcctcagcctcccaaacagctgggactacaggtacgcgccaccacacccagctaatttttgtatttttagtaaagacagggtttcaccatattggccaggtgggtctcgaactcctgacctcatgatccactcgcctcggcctcccaaagtgctgggattacaggcgtgagccactgtgcctggcccagagtctcttatgtttaacccagcagctatacgcccctcactaggctgaacctaaatgaatcctaaataaaaagtctaaactttttaaggttaaaaaaatttttattaaaaaattactagtatgaccataaccatttgcccaatttctgaaaatatgcaaattttaagtaatcttaacgtaaaccgatttccagaaaaataacagaacaaatcaaaacaagtaaaaatcaaggtataacaaaggttcctgaatttccaaaaattaatgaagacccattttaatgaaacttggggcaatgtcacaagtctacttagtggcctgcaatcatctacttctaaacagctatttttaaaaagaaaaccaaaattgaacatttctttctttgttttttaaagagacgtgagtctcactatgttgcctaggctggcctcaaacttctgggcttaagcaacccttctgactcaaccttctgagtggctaggactacaagagtgcacagccacctggctaaaactggacatttctgattaagtatatcaacatctgtgacaaaatattagtttcaatagtggtaattccttaaaatttcaaaagtaagttttttgtataaccaactgatagtatgaaaaattaaattatcaatcttctttgttgttgttttaagagaaagggtcttgctttgtcgcccaggctggagtgcagtggtataatcagctcactgccacctcaaattcctgggctcaagcaatcctcctgcctcagactctcaagcagttgggactacaggcatgtgccaccacacacacctggctgattttaaaacttttggtagagatggggtctccctacattgcccaggctggttccaatctcctgggctgaagctaactgatcatgttggccttccaaagtgttaggcttggccaggtgtggtggctcacacctgtaaccccagcactttgggaagccgagatgggcaaatcgcttgaggccaagagtttgagaccagcctggccaacgtggcaaactccatctctaccaaaaaataacaaaattagtgggcatggtggcacacacctgtaatcccagctactcaggaggctgaggcatgagaattgcttgaacccagaaggtggaggttgcagtgagctgagattgcaccagtggactccagccttggtgacagggcaagactgtctcaaaaaaagtgttaggcgggccaggcatggtggctcacacctgtaatccctgcactttgggaggccaaggcgggtggatcacctgaggtcaggagttcaagaccagcctgaccaacatggagaaacctcatctctactaaaaatacaaaattagtcgggcatggttgcgcatgcctgtaatcacagctactcaggaggctgagacaggagaatcacttgaacccagaggcagaggttgcagtgagccgagattgtgccattgcattgcagtctgggcaacaagagcaaaaagaaaaaagtgttaagcggaaaaaaaaccatgagccactatgcccggcctatcaattttcttaaataaaattttcactgtttaagacctaaattaaattcagaacaaaacaggaaatgtgaaaaccacagccactccctcaaactggttaacataaagtcattaagaaaataagatatactttattattatttttctccctggactgttcagcatgagaaaaatgagatatattatggtaaaaatgaaattgtgactgttcttttctttttgttttttctgagatggagtctcactctgttgcccaggctggagtgcagtggcacaatcttggctcattgcagcctccgtctcctgtgttcaagcgattctcctgcctcagcctcccaagtagctgggattacaggcatgagccaccatacctggcaaacttttgtatttttaatagagatggggtttcaccatgttggccaggctggtctcgaactcttgacctcaagtgatccgcccacctcagcctcccaaagtgctgggattacaggcgtgagccactgtgccaggccaaaattgtgacttttcaaatttaacggatatattaaaaataaggccaggagtggtggctcacacctgtaattccagcactttgggaggccaaggtgggcagatcacctgaggtcaggagtttgagaccagcctgaccaacatggagaaacctcgtctctactaaagatacaaaattaagcggttccaagatggtcgaataggaagagcttcagcctacagctcccagcatgagcgatgcagaagacgggtgatttctgcacttccaactgaggtaccaggttcatctcactagggcttgtcggacagtgggcgcagaacagggggtgtggcacaccgagtgtgagctgaagcagggcaaggcatcacctcacccgggaagcgcaaggggtcagaaaattccctttcctagccaagcaaagctgtgacacacagcacctggaaaattgggtcacccccaccctaatactgtgcttttccaatggtcttagcaaacggcacaccaggagattatatcccactcctggctcagagggtcccatgcccatggagcctcactcattgctagcacagcagtctgagattgaactacaaggcggcagcctcagccaggaaactcgaactgggtggagcccactgaagctcaaggagtcctgcctgcctctgtggactccacctctgggggcagggcatagccgaacaaaggcagcagaaacctctacagatttaaatgtccctgtctgacagctttgaagagagtagtggttctcccagcacagagtttgagatctgagaatggacagactgcctcctcagtgacaggtgggtccatgatccacaagtagcctaactgggaggcaccccccagtaggggcagactgacacctcacacggccgggtacccctctgagacgaggcttccagaggaatgaccaggcagcaacatttgctgttcaccaatatttgctgttctgcagcctccgctgctgatacccaggcagagtctggagtgggcctccagcaaactccaacagacctgcagctgagggtcctgactgttagaaggaaaactaacaaacaaaaaggacatccataccaaaaccccatgtgtacgtcaccatcatcaaagaccaaagatagatgaaaccataaagattggggaaaaaacagagcaaaaaagctgaaaattctaaaaatcagagcacctctccccccccaaaggaacgcagctcctcaccagcaacggaacaaagctggacggagaatgactttgacgagttgagagaagaaggcttcagacgatcaaacctctccgagctaaaggaggaagttcgaacgcatcgcaaaggagctaaaaaccttgaaaaaagattagacgaatggctaactagaataaccagtgtagagaactcctcaaatgacctgatggagctgaaaaccatggcacgagaactacgtgacgaatgcacaagcctcagtagccaattcaatcaactggaagaaagggtatcagtgatcaaagatcaaatgaatgaaatgaagcgagaagaaaagtttagagaaaaaagagtaaaaagaaacaaacaaagcctccaagaaatatgggactatgtgaaaagaccaaatctacgtttgtttggtgtacctgaaagtgacagggagaatggaaccaagttggaaaacactctgcaggatactatccaggagaacttccccaacctagcaaggcaggccaacattcaaattcaggaaatacagagaatgccacaaagatactcctcgagaagagcaactccaagacacataattgtcagattcaccaaagttgaaatgaaagaaaaaatgttcagagagaaaggttaggttacccacaaagggaagcccatcagactaacagctgatctctcggcagaaactctatgagccagaagagagtgggggccaatattcaacattcttaaagaaaagaattttcaactcagaatttcatatccagccaaactaagcttcataagtgaaggagaaataaaatcctttacagacaagcaaatgctgagagattttgtcaccaccacgcctgccctacaagagctcctgaaagaagcactaaacatggaaaggaacaaccggtaccagccactgaaaaaacatgccaaattgtaaagaccatcaaggctaggaagaaactgcatcaattaatgagcaaagtaaccagctaacatcataatgacaggatcaaattcacacataacaatattaaccttaaatgtaaatgggctaaatgctccaattaaaagacacagaatggcaaattggataaagagtcaagacccatcagtgtgctgtattcaggagacccatgtcatgtgcagagacacacataagctcaaaataaagggatggaggaagatctaccaagcaaatggaaaacaacaaaaggcaggggttgcaatcctagtctctgataaaacagactttaaaccaacaaagatcaaaagagacaaagaaggccattacataatggtaaagggatcaattcaattcaacaagaagagctaactatcctaaatatatatgcacccaatacaggagcacccagattcataaaccaagtccttagagacctacaaagagacttagactcccacgcaataataatgggagactttaacaccccactgtcaacattagacagatcaacgagacaaagttaacaaggatatccaggaattgaactcagctctgcaccaagcagacctaacagacatctacggaactctccaccccaaatcaacagaatatacattcttctgagcaccacatcgcacttattccaacactgaccacatagttggaagtaaagcactcctcagcaaatgtaaaagaacagaaattataacaaactgtctctcagaccacagtgcaatcaaactagaactcagcattaggaaactcacccaaaactgctcaaccacatggaaactgaacaacctgctcctgaatgactactgggtacataacgaaatgaaggcagaaataaagatgttctttgaaaccaacgagaacaaagacacagcataccagaatctctgggacacatttaaagcagtgtgtagagggaaatttatagcactaaatgcccacaagagaaagcagaaaatatctaaaattgacaccctaacatcacaattaaaagaactagagaagcaagagcaaacatattcaaaagctagcagaaggcaagaaataactgagatcagagcagaactgaaggagatagagacacaaaaaagccttcaaaaaatcaatgaatccaggagctggttttttgaaaagatcaataaaactgatagaccgctagcaagactaataaagaagaaaagagagaagaatcaaatagatgcaataaaaaatgataaaggggatatcaccactgatcccacagaaatacaaactaccatcaaagaatactataaacacctctatgcaaataaactagaaaatctagaagacatggataaattcctggacacacacaccctcccaagactaaacgaggaagaagttcaatctctgaatagaccaataacaggctctgaaattgaggcaataattaatagcctaccaaccaaataaaaagtccaggaccagatggattcacagccaaattctaccagaggtacaaggaggagctgttaccattccttctgaaactattccaatcaatagaaaaagagggaatcctccctaactcattttatgaggccagcatcatcctgataccaaagcctggcagacacacaacaaaaaaagagaattttagaccaatatccctgatgaacatcgatgcaaaaatcctcagtaaaatactggcaaaccaaatccagcagcacttcaaaaaacttatcaagtgggcttcatctctgggatgcaaggctagttcaacattcgcaaataaataaacgtaatccagcatataaacagaaccaaagactaaaaccacatggttatctcaatagatgcagaaaaggcctgtgacaaaattcaacaacgcttcatgctaaaaaactctcaataaattaggtattgatgggatgtatctcaaaataataagagctatttatgacaaacccacagccaatatcatactgaatgggcaaaaactggaagcattccctttgaaaactggcacaagacagggatgccctctctcaccacttctgttcaacatagtgttggaagttctggccagggcaatcaggcaggagaaagaaataaagggtattcaattaggaaaagaggaagtcaaattgtacctgtttgcagatgacatgattgtatatttagaaaaccccgtcgtctcagcccaaaatctccttaagctgatagggaacttcagcaaagtctcaggatacaaaatcaatgtgcaaaaatcgcaagcattcttatacaccaataacagacaaacagagagccaaatcatgagtgaactcccattcacaattgcttcaaagagaataaaatacctaggaatccaacttacaagggatgtgaaggacctcttcaaagagaactacaaaccactgctcaatgaaataaaagaggacacaaacaaacggaagaacattccacgctcatggataggaagaatcactatcgtgaaaacggccatcctgtccaaggcaatttatagattcaatgccatccccatcaagctatcaatgactttcttcacagaattggaaaaaactactttaaagttcatatggaaccaaaaaagagcccgcattgccaagtcactcataagccaaaggaacaaagctggaggcatcacgctacctgacttcaaactatacaaaacagcacagtactggtaccaaaacagagatacagaccaatggaacagaacagagccctcagaaataataccacacatctacaaccatctgatctttgacaaacatgacaaaaacaagaaatggggaaaggattccctatttaataaatggtgctgggaaaactgcctagccatatgtagaaagctgaaactggatccattcctcacatcttatacaaaaattaattccagatggattaaagacttaaatgttagatctaaaaccataaaaaccccagaagaaaacctaggcaataccattcaggatataggaatgtgcaaggacttcatgtctaaaacaccaaaagcaatggcaacaaaagccaaaattgacagatgggatctaattaaactaaagagcttctgcacagcaaaagaaactaccatcagagtgaacaggcaacctacagaacgggaaaaaattttgcaatctacccatctgacaaagggctaatatccagaatctacaaagaactcaaacaaatttacaagaaaaaaacaaacccaatcaaaaagtgggcgaaggatatgagcagacacttctcaaaagaagacatttatgcagccaacagacacatgaaaaaatgctcatcatcactggccatcagagaaatgcaaatcaaaaccacagtgagaaaccatctcacaccagttagaatggcaatcattaaaatgtcaggaaacaacaggtgctggagaggatgtggagaaataggaacacttttacactgttggtgggactgtaaactagttcaaccattgtggaaggcggtgtggcgattcctcaaggatctagaactagaaataccatttgacccagcaatcccattactgggtatatacccaaaggattataaatcatgctgctataaaaacacatgcacacgtatgtttattgtggcactattcacaatagcaaagacttggaaccaacctaaatgttcatcaatgatagactagattaagaaaatgtggcacatatacaccatggaatactatacagccataaaaaaggatgaattcatgtcctttgtagggacatggatgaaactgggaaccatcattctcagcaaactatctcaaggacaaaaaaccaaacaccgcatgttctcactcataggtgagaactgaacaatgagaacgcttggacacaggaaggggaacatcacacacttgggcctgttgtggggtgggggaagtagggagggatagcattaggagatatacctaatgtaaatgatgagcacagcacaccaacatggcacatgtgtacatatgtaacaaacctgaatgttgtgcacatgtaccctagagcttaaaagtatttaaaaaaaaaaaaaagatataaaattagccaggcatggtggcgtatgcctgcaatcccagctactcaggaggctgaggcaggagaatcgcttgaacctgggaggcggaggttgcagtgagccaagatcgtgccaatgcactccagcctgggcaacaagagcgaaactccgtctcagaaaaaataaataaatacaaagaaatccagcatagtagagatcaagaaaataggtaacatactgtgtttgtggacaaagaggatatgagcaaataggaatactcatattgctaaaggtgtataaaatgatacaacatcaatgcagaacaatctggcattggaattataagtgcagattaacttgaaccatacatgaatccatcttatagctatatatgcatctgtgagaaatgctattcatataaaattattcattgcagtactgtctgtactagcaaaagaccggtaaccatcttttgtccacaagtagagaactacatgaactatgacatgtctattcaatggatacacaaagattaaagctcttatttttctatctatccatccatttatgtatttactttttctgatagccttgctatagtataaagaagttctttttgtttttttggtttttttgagacagagtttcgcttttgttgcccaggctggagtgcagcggtgtgatctcagatgactgcaatctccgcgtcccgggttcaagtgattctcctgcctcagccttccgatttgctgggattacaggcatgtgccaccaagcctggctaattttgtatttttaatagagacagggtttctccatgttggtcaggctggtctcgaactcccatcctcagatgatccgcctgcttcggcttcccaaagtgctgagattataggcgtgagccaccatgcccagccagtataaagaagttctttatgtagtaatataaaataagctacaaaagctattgttaagttaaaaaagtaaggtacagaataatgtgtaaaacaaaaaatagacaaatatgtatttgcacataaatagaataattttggaaagttccacaagaaacttgttgcagtgattgtttttggagacagaaattagttggatgaaactacttattatcactcttctttttgtatcttttgctatttctccccattaaactatttaaaaacaaacaaaaaattaattacaaaatataatgtcccaataaaatatatccacaatttaaaaatatacaatttattaaagcatattttaataaatattataaatagacattaatatttgtggcttccttatagtcacaagtgtccagaatgcccactaccaatgccaatgtattatttgtattaaggaataacagcattgcataattttgtattgctgctactgtatactttttacttggtcactgcatgctaaatttctctatgtactgacctttggttttcagtgttttgaggaggacatatagctggggtttcagataatacatttttaagattttcttctttcacttcctcagttttattagtttgagaatttcttttctggaaataggatgctgcagatgcctataaaaacaaacatgaatactgcaataacatctagtataattttatatgttttataagcacgttctgaaaaatgtgaagaaacatctataattattgagaattcttatactaacatgtgaaatctggagttctcagttgtaaataaataggcaaacacatgcaaaaccaaaaaactacacttcagattccatgttttccttttttttttttttttttttgagacggagtctcactctgttgcccaggctggagtgcagtggcgctatctcggctcactgcaacctccaccctccgagttcaagtggttctcctgactcaccctcccaggtagctgggattacaggcacctgccaccgcggctggcctaaattccatgttttctaaatgaatacaattatattaaatagaaaagataagcaatagatctattttaccaatgactaatccgggatcaaatacttatcagagtggaaaaatcaggactcagaacaaggaaaaattagggccatgtacaatatcagccactattaaatacgaatatacatcagaactatctgggtgattttaataaaaatacagataaatgtctgagcttctggggtctgagtatatatatttttaaaaagtgatctgtaaaaacaaggagaggggcaggataggctgggtgcggtggctcatgcctgtaataccagcactttgggaggctgaggtgggtggatcacttgaggccaggagtttgagaccagcctggccatcatgctgaaaccccatctctactaaaaataccaaaattagctgggcgtgatgtcaggcctctgtaatcccaactcctcgggaggctgaggcatgagaattgcttgaacccaggagacagaggctgcagtgagctgagatcctgacactgcactccatccagcctgggtgacagagtgagcctctgtctcaaaaaagacagggggagcaggatagtgatcttggaagtcagaatctgctacaaagtgtgtaacaactcacgaggcagaatagggagtgattctgaaacaaaaaacacaactgttttggggtttgtttttttcagatggggtatctcttatgtttcccagactggactcaaactcctgggctcaagtgatcctcccacctcagcctcctgagtatctgggactacaggtatgtgccactgtgcctagctgcaaaaacagaattgaacccacttccctagcaagacaattgtaaacaatcagaacctcctatcctatatctgaaacagtgaacaaaactgaagacaaacagatcccatgctgcttactgcagatgagggtagctgaaacagtacctgcttaggcttcggctttggaatcagaggctttataatgggagacttttcattatttgtagttcgactaagtgcagtggatttcttggatgatttgcccatattgtctaaaatattagttgaacgtgctgaattcattgacatggctggttctttggaactggctgatacctaaagagcaaactagtgttagcactgtatgtttaaagaagaaaaataaaatcccaagagacttattttttcttgaaatttctgttaagtttgtattgccatctcatctttagaactaaatacatttggtacaatccaaattaagaatgatacgtatattcccaaataccacatccccaagaaagacagaggtatctttcaaaaccataggtacttagaaggtaagtagaaaagacaactctcagcccaagtgctgctttcttctgtttccacacagatcagtctttcatgcctccaagtctggggagagtcatctcatcatttggaaatatttctttgtatacaaatgtatttaaataatataaaacatcacttggaagagtttaccttaaagggatttactcgtccttggctgctaaaggtaactgcacctttcacaaaaaagaaacccttgcttaataatggtagaaaatagatgacttctgacatctataatactagacagagtattttaatccccattaaatgaaaacaaatgtattttgcaacttttcaaaactattaacaacagatatcctctttcctacttctaagccaaaataaaagctattaaatgtgaaccaccccaacgtgccactatgaaacatattcagtatgtacagatcttttatcttctgttactgcggaagagtggcagctcgtctgagctaaggttagtaatccctttacttgtgttctgcatcccatgccctcctgctttgtcagaaaacctgacctatcaagtttcttgacatcctacatctttgacttttccctatttattggcccctaaagtctcccaacttaaaaagaaacaaaaaacaaaccttctctaccccacattccttccagtcaccattttctctcgcctcctccatccagccatttttttttttttttgagacagagtctcgctcttgttgcccaagctggagggcaatggtgtgatctcggctcactgcaaagtccacctcccaggttcaggcgattctactgtctcagcctcccgaattgctgggattacaggcgcctgctaccacgcccggctaatttttgtatttttaatagagacagggtttcaccatgttggccaggctggtcttgaactcctgacctcaggtgatccgtctgccttggcctcccacagtgctgggattacaagcatgagccaccacgcccggtcatccagccaaatttttccaagaactgttgacactattatcatttcctcaccacccatacattcctccatacaatatagcacttccagctctaccaccctacagaatctcctcttgctaaggccctcagtgatctctacattgtcaaatctggtggatacctttcagtcaccttgtttgctctatcaatggcatcccacatagctgactgttccttacttcttgatactttgtcctctcttgacttctgagatactgcattccctgacttagttccttcctctctggacctgtggactcattgtgttccaatagttggttcctcctcttcctctacctgatgctcaaatgttggagattccctaggcttaagctcatttttctttttgctttacattctcccccaatgcttgcttacccatgctcatggtttaaattgctatacttatgccaatgattttcactttgtatctcttgaccagaatacttccctgagctcctgattcaaatatctgtcttcacgacattctactcaccttacagtaattcatcatcttcctctctaaatctgcttttctctagtgtttcctgacttaggaaatggcaccatcattcactcaagtactcaagccagtgttaacaaactaatctctaattaagagctttcctggcatggtggcttaagcctgtaatcccagcactttgggaggctgaggagggaggactgcttgagcccagtttaagactagcatgggtaacatagggagaccctgtctctacaaaaacaaaaaacaacaaaacaaaaaacccaaaccaaaacaaaactagccagacatggtgacacatgcctgtggtcctagttacttgggaggctgaggtggaaagatcgcttgggtctggggggttgaggctgcagtgagccataatcacgccactgcactctaacctggatgacagtcacaccctggcggggggaagaggagggagggagggagggaagaaggaagggagggagggaggcaggcaggcaggcaggcaggcaggcaggaaatttctagctgagcatggccacttgtgcctgtaatccgaaaattttgggaggctaaggcaggagggtcacttaagcccaggagttccagaccagcttcggcaacaaagcaagctcctctctctacaaaaagtacacacaaaaaattaaccaggcatggtgatgcacaactgtagtcatagctactcagtagggtgaggcaggaggatcacctgagcatacgagttcaaggctgtagcgagctaggactgcatcactgcactccaactctgctccagtctgagtgacaaagcaagataccctgtatccgcaccccccccaccaaacaaaaaaaacaaacaaaaaaacctttccatctagccaataaaaattgttttatttatctcgtttctgaaaatactttataaaagtttccccttttgtctctcctggcagagtgctagccccttgcggtttggtgcctccctgattcatgaatcactgaatgttcaaattaatccttcaagattcaaatgtgcttaagtttttcttctattacaagaaactgagaatcactctttacgccctgaactcctacactctcttcatcatcttcagaaatagctctccaactctgcccattctttctaacatcaccatcaccaccctagctcaggcccttattcaatctcatttggactgcctctgtagtttgtttgtttatttatttatttgagatggagtctcgctctgtcgcccaggctggagtgcggtggtatgatctcacctcactgcaagctctgcctcccgggttcacgccattctcctgcctcagcctcccaagtagctgggattacaggtgcctgtcaccatgcccggctaatttttatgtatttttagtagagacggggtttcactgtgttcttcaggatgctctcaatctcctgacctcgtgatccaccctcctcagcctcccaaagtgctgggattacaggtgtgagccaccacgcccagcttgtagtctctttattttttaatttttatttacttcttcttattattattttagatgaagtctcactctgtcacctaggctggagtgcagtggcgtgatctccacttactgcaactccccactcctggattcaagcaattctcctgcctcagcctcccgagtagctgggattacaggcatgagccaccatgcccggctaatttttttttttgtatttttagtggagatgtggtttcaccattttggccaggctggtcttgaactcctgacctcaagtgctccacctgcctcggcctcccaaagtgctggaattacaggcgtgagccaccacgcctggcctatttattttttgatacagggtcttgctctgtcacccaggctggagtgcagtggtgcaaccatagcctactgcaccctcgaactcctgggctcaagatatcctcctgtcccagcctcccaaatacctgggactaccggtgtgtactaccatgcctggctaatatttttattatttactttttgtagagatagggtttcattgtttccaaggctggtctcaaacgtctggtctcaagtgatccttccaccttggcctctcaaaatgctgaggttacagacatgagccatcacacctggccagtagtctattatctgttcttcttcagcacagtgtgccatgctatacctctgcttaaaacctacaacagtctctcagtgaccttagaataaagagcaaaatcctgaccgggtgtggtggctcacacctgcaggtccaacaactttgggatgtggaggtgaggaaattgcttgagtttgagaccagcctggacaacagagtgacaccccatctctattaaaaaaaataaaataaaataaaaaaaagaccaaaatccttaatatggcctacacagatctgcatgacttggctcctgcccatcactccgaaacccttcagcaccactttctctttgctctctgagcttttcacaccacccttttgcagccttcagttcacacatactgttccttaagcccaaatgcttctcttctgctcctgttcccatgcacctttgccttgctgactgttattcatccttcaggtctctgctgtaaacactccatgaggcctgccttgaagtccctacccatcctccaccactggctagatgacagctatgtgtcatacgctcttttcatattctacatgttttttaagttaatttttttaaatcaaagtaacatatgtccacagtttaaaaagtcaaatggtactataaggtttatgctccccaccaaaaaagggccagcagtgccttacttcaaccttctcttatcccccaggcccactccctgtacgcaaccattttcaactccttttttttttttttgagatggagtctcactccattgcccaggctggagtgcaatggcacgatctcggctcactgctacctccacctcctgagttcaagtgattctcctgcttcagcctcccgagtagctgggattacaggcacataccaccaccctcagctaatttttgtatttttagtagagatggggtttcaccgtgttggccaggctagtctagaactcctgacctcgttatccgcccactccggcctcccaaagtgctgggattacaggcgtgagccactgcgcccagccttcaattccttttaactgtttctccagtatcctgcatgcttcctcagtgatacccagatctgtcttcaacatctgtcttctcagctgggctaaaatagcattaaaacagagatcaaccacacatgtctgtttgacttctgtatccaccattaagtaaaatgcctgacactcaataggcattttataaacatctgttaaatgaccatagcttcacaaacaacatctgagattaaaaaaacaaaaacataaacacacacacaccaaaagtggccttaagagttaaggtgtatttgcgtagatgtgtcactttgcagatgacttgcaaaatttccttgatattacaaatttataaatatttctcacctgacttagctgaaacatcagaggaatttgtacttttggaaaacgagttctgtcctacagattaaaataaagcaatataatgtaaatggggaaaatatagtcatcctcaatatacaacaaccagatagcaaagaggtctgaaaaaaagtatgagtattcaatttccctcagttaagcaaaatgggaaaagccacatccatgatagttctcatgatttatgggcttgaaaatgtatctcaccaggcttatgtatttctggtttttcttcatcatcagcttctccactgtcctcagcatcttcttcaacttgatttctgaaccttggttggctccactctgtagcagtattgctgtaactaagagaaaataatattattcaataaagagctatgcaaagaccaacttaacattcaagacagtaaaggaaaattcaaacaactaaattatttcttacccagcattcagcttttttctgaaatcttcttcttcttcttcctcttccacctgggttgctgtcaattcggctgccttctctacagccagttcacttagtttttgagccagtattaatttccgagagcgagaagcatatttaatggctaaattcacagcattttgagtcattagatcagcaagttccacacaacggaattctcgctccagtttacaagaaagctaatccaaaaaggggggggggggggagatcaaataacatcaagtaaaactttttaaagatactgacactactagtaaaactgagacaatagttttctagctactctatctccctaattctaagatgcacatttttacaagttttaacatctctgaaattggaattacaattaattacaattaatggtgggtcagtttggcagcatttttatgtctccatggcttaaatgaataaagtaatggtgcactatgcaataaacagtggcttagatttgatgaaatattacataccactttaatctactaattgcaagaaaattaagaaatttgtttaaaaaattcaagggggaggctgggcacggtggctcacgcctgtaataccagtgctttgggaggcccagatgggtggatcatgaggtgaggagttcgagatcagcctggccaatatggcaaaaccccgtctctactaaaaacacaattagccaggcgtggtggcgtgcgcctgtaatcccagctactcgggaagctgaggcaggagaatcgcttgaacccgggaggtggaggttgcagtgagccaagattgcaccactgcactccagcctgggcgagaaagcgagactctgtctcaaaaaaaaaaaaaaaaaaaaaaatcaagggggccaggtgtgctggctcacacctgtaatcctagcactttggaaggccaaggcagagggactgctagaggccaggagtttgagactaacctgggcaacacagtgagaccctataactacaaaaaataaattagctgggcgtggtggcatgcacctgcagtcttatctactcaggagcctgagacaggaggttcactagagcccaggaggttgaggctgcagtgagttacaatcttgccactgtactctagcctgggtaacagagtgagaccctttctctaaaaaatacaaaaaagaaaaacaacaaactgagaaaagttggtattttgaagattactaagggtctcctaattcatagtgtattagaactattttcttacttagatattccatgtctgatccatcagcacaaaagctttagatattcacctggatgcccttttcaagatttttagtatcatttatctataatcagtacttcttaatcgggatggtacactgcctcagggggcatttagaaataaaaaggaagccgggcgcagtggctcacacctgtaatcctagcactttgggagactgagacaggtggatcacaaggtcaggagatcgagaccatactggctaacacggtgaaacacagtctctattaaaaatacaaaaaattagctggtgtggtggcagacaactgtagtcccagctactcgggaggctgaggcaggagaatggcgtgaacctgggaggcggagcttgcagtgagcagagatcgcgccactgcactccagcctgggcaacagagcgagacttcgtttcaaaaaaaaaaaaagaaataaaaaggaatagtctggtttccacagtgactattctgaactaaaggcatttgcccgggggtcaggaatgctaaagaagaactcaacaatccccttgaactcctgggctcaagatatcctcctgccctggcatctttgatatgagtcccctggtatttttgatatgagaaacactgccacagggaaaagctcctctaggctaaatagcaaatacatgaaatatgtttccttatatgtgttgtacaaataaaaaggctactagttcctggaccacaagtaacactttataaaaggaataaaactttttctacaataaactgagttttcttaataccaaacttaaggccatgttgcataaaggtgacagtagtgagtactaccttttggagacaagagtggcaatttgctctgtggtctcatataccacttttctctaagaaccttttttctccaattttaaaattaaaagtctggaccattcactcttgtcaacaaatatcgaggtctactatgtgttaagccaccatgtcagtgcctggcatacagcagtgagcaggtctctgccctctggggcataaagtctagtgtaagacaaataaagaagaaatgatactatactcctctccataaaccaaccttgagtggggacacaagcacaggaactttaagacaccctgctccaaagataaatgtacttaaatattctagacaccaaacctggccactggtcacaaataaattttcatcacacacagctgcctaactcaaagaggatgacaaaaggcaggcatatctaacagcccgatcaaagttcttaagattgcccagccctggagattaaaaaacagtatatactcaaactttgtaaaataataacagaaactagagcagtggttctcagttaccttgagagcccgttaaaacatagactgatgggcaaaagcaaaagggaagtagccctagagatgtttattcctgcacatgatcttagctacaaggtactgttttatttattttaggctgggcacggtggctcatgcctgtgatcccagcactttcggaggccgaggcaggtgaattacctgaggtcaggagttcaagaccagcctgaccaatgtggtgaaaccctgtttctactaaaaatacaaaaattagccaggcatggtggcacacgcctgtagtcccagctactcggaaggttgaggcaggagaatcacttgaacccgggaagtggaggttgcagtaagccaagactgcacaactgcacttcagcctgagaaacaagagcgaaactccgcctaaaaaaaaaaaaagaaaaaaattttaactgcaagaccaactagaagatagaactttacaagggaaaacaccaccagataaaacttaagaatggctgggtgtggtggctcacacctgtaatcccagcactttgggaggctgaggcgggcggatcacgaggtcaggagttcgagaccagtcgggccaacatagggaaaccccatctctactaaaaaaaaaaaaaaaaaaaaaaaattagctaggcgtggtggtgtgtgcctgtaatcctagctactcgggaggctgaggcagaattgcgtgaacccgggaggcagaggttgcagtgagccgagatcgcaccactgcactccagcctgggtgacagaacgagactccgtcgcacaaaaaacaacaacaacaacaaaaaaaaacttaagaatcttaggttgtgggacttagtcctaatgcacagacctttaagaaattcaacctatagaaaagcatttaactttaacgttttcagtatatttattttactcaccgcaagcattttcattaaaagttcctgttgctcttttgttgcttgatttttagtgctctcttcatattcataaccatttttagctaaataatcaaggtggttgtgaaatataactgaacgccaaaattgctcctataaaagcaaataaaattgcttaaggccaactatcaccttaatatgaggcaagcgttaaatatttatcttaagataccagtttttgaataaaatatgttctgaactcttcctttctataagtttattttacaatttaaattctagtgtgatactacagcttaactttttcccctatccttaaaaaaggcagctggggaggaatacagcatttaaaacagtttcctagctatcataattaatgctcagagaatttggtaaacaagatttttaaaagctaacttgtttcttatttagaataactaactgcaagatttcaaatgacttttgatgacacaaggctaggactagggtcaggcaagccaggtgttatggcacaaaatgtatggaggcacttcttctcagggacatgccccatcctgagagtaagtctttccccagtgggtctctgacagtcacacccatttactttgtagacaaagtccctggaagcagtgatggcaatcaggtggcctggtgatcccaagcagtcctcttccctccctgctacccctatttatgtaattatacagtaatgaatattcaatactggccatcaggataattttaaagtgtgtgtatcacaggtgctgtattatcaaattcaaagtgtcaaggtaagacttccacatacctccatttgtcctttctctgttgcaatctgacagtaaggaagcttaaaggataatatagcaacagcagggcgtggaagggttgggggaaaccgagaacctttacaaggaatgcacctgttagtaaagaaaagttccatcataaaaatttactaacatgtcataaaaactacaaaatttaaaaagttttcaaaagttagtaacttagaatagtaatattataatagctgccttaatcatatataacaaatatctctttttaaaaaagtgttttaggcttgactaggcataaagactatccctacatgcatttcaagaatagaaaaattccttctcacatctcacttgatttattttttttgagacagggtctcactgtgttgcccaggctaaagcacggtggtgtgatcacggctcactgaagccccaacctcccaagttcaagcaatcctcccacctcagcctcccaagtagctgggactacagatatatgccaccatgcctggctaacttttgtattttcagtagcgatggggttttgccatgttgcccaggctggactcgaactcctgggctaaagtgtgcctcccacctttgcctcccaaagtgttgggattacaggcgtgagctaccctgcccaacctcacatctcactttattaaatgacaaccactaaaagtgaaatcagctctcttcatattttccttagcaaactaccacttttaaaacataaaaattgtaccattaatacctgtcatggaatccatgttatcaccaagataaatgctgatgaagctgcacatggaacatactctaaggtcaaccacatgcttggccgtaaagcaagtctcaaaaattttttttaaattgaaatcataccaagcatatattctgagaccatagtaaaataaaaatagaaatcaatactgaggatctctcagaaccacacaaattacatggaaagtaaacaacatactccagaatgacttttgaataaacaatgaaattaagcagaaattgaaatattctttgaaataaatgaaaacagacacaacatatcaaaatatatgggatgcagcaaaagcaatgttaagaggaacgtttatagcactaaacacctatatcaagttagaaagatctcaaattaacaatctaacattgcatctagggaaactagataaacgagaacacactaaccccaaagctagcagaagaaaagaaataactaaaataacagcagaactaaacaaaattgagactaaagaatccatacaaaggatcaataaaacaaaaaaaattgattttttgaaaggataaacaagatcgataaactcctagctagattaacaaagaaaagaagagggaagctccatataagcacaatcagaaaatggcaaaggtgacactacaactgattccacagaaatacaaaagatcctcagagactattatgaacacttctatgtgcacaaaccagaaaatttagaggaaatgggctcacacctgtaatcccaatacttttggaggcaaaggtgggagaatcacttgaggtcagaagtttgacaccaccctgggcaacaaaatgagacccaattgctacaaaaatttttaaagattagccaggtgtggtggtgtgtatctgtagctccagctgctcagaagactgagatgggaagattaattgagcttgggaggttgaggctgcagtgagccatgatcatgccactgcactccagcctaggtaagaccttgtttctatttatttatttatttatttttgagacggagtctcgctttgttgcccaggctggagtgcagtggcacgatctcggctcactgcaagctccgccttccaggttcacgcaattctcctgcctcagcctcccaagtagctgagactacaggtgcccaccaccacgcccagctaatgttttgtatttttagtagagacggggtttcaccgtggtctcgatctcctgaccttgtgatccgcccgcctatgcctcccaaagtgctgggattacaggcgtgagccaccgcgcccagcattaagactccgtttcaagaaaaaaaaaaaaaaaagagagagagaaagagaaagtcctcaaaagcaattgcaacaaaaaccaaaactgacaagtgggacctaattagactaaagaacttctgcacagcaaagaaaatctagaggaaatggataaattcctggaaacataaaacttcccaagactgactcagaaaaaacagaaattctgaacaaaccaataatgagttccaaaattgaatcgtaataaataaaaaacctatcaaccaaaaaaagccctggaccagaaaaatcacagctgaattctagatgcacaaagaactggtaccagtcctactgaaaatattccaaaataccaactcctctccaaatcactctataaagccagcattatcctgataccaaaatctggcaaagacacatcaaaaagagaaactacaggccaatatccttgatgaacacagatataaaaatcctcaacaaaacactagcaaaccaaacccaacagtactttaggaagttaatacaccacaaccagtaggttttactcctgggatgtaaggttggttcaacatatgcaaatcaatatatgcaattcactgcatcaacagaattaaaaacaaaaaccacatgatcatctcaatagatgcagaaaaagctttcgataaaattcaacatcctttcataataaagacctccaacatactaggcattgaaggaacataactcaaaataaaaagagccatctatggcaaacccacagacaacaccatatgaatgggaaaaagctggaagcattacccttaagaattggaataagacaaggttggccactcttttcactcatatttaacagagtactgaaaatcttagccagaacaatcaagtaagataccaaaataggaaaagaagtcaaatatctctccactgactatattactctatacatagaattgctaaagggctcctagataaaagactttggtaaagtttcaggatacaaaatcaatatacaaaaatcagtagcatttttatacaccaataatgttcgagctgagagtcaaatcaagtatgcaatcccatttacaatagtcatacatgtacataaaatacctaggaatatatctaaccaaggaggtgaaagatctctacaagaactacaaaacactgttgaaagaaatcacagataacacaaacaaatggaaacacattccacactcatggattagaagaatcaatatcattaaaatgaccatactgtgtctgcagcaaccttggtttgcatcgaagtcacagcaccaaaaaaaaaaaaaaagaaagaaagaagaaagaaaaagaccatactccccaaagcaatctatagattcaacactattcctatcaaattaccaatgtcatttttcacagaattagaaaaaactattctaaaattcatatggaaccaaaaaagagcccaaatagccaaaggatctaaaacaaaaacaacaaagctggaggcatcacattacccaacatcaaactctacttcaaggctagtgaaaaagaacatggcactggtgcacaaacagaaacacagaccagtggaacacaatagggaacacagaaataaagccacacacctacaaccaactgatctttgagaaagctgacaaaaacaaggaactgggaaaggaatccctactcaataaatggtgctgagataactggctaaccacatgcagaatgaaactggacccttaactatcaccatgtgcaaaaattaactcaagatggattaaacacttaaatgtaagacctcagaatataaaaatcccagaagaaaccctagcaaatacccttcaggatattggccttggtaaatatttcatgactaagtccacaaaagcaattgcaacaaaaacaaaaattgacaagtgggacctaattaaaccaaagagcttctgcgcagcaaaagaaactaccaagagtaaacaggtcaggtgcaatggctcacatctgtaatcccagcactttgggaggccaaggcaggaggattacttgagcccaggagtttgagaccagcctgggcaacaaagggagacctgtctctacaaaaaaatttaaaaattatccaggtgtggtggcatgtgcctgtagtcttgtgcaatcccatttacaatagccatatgcacacacacaaaatacctaggatatatctaaccaaggaggtgaaagatctctacaagaactacaaaacactgttgaaagaaaccatagatgacacaaacaaatggaaagacatttgcagatcctgaggtggatcactgagcccagaaagtcgaggctgcagtgagccatgatctcatctcaccaccgcactgtagcctgggtgacagaatgagactctgcctcaaaaaaaaaaaaaaaaaaaaaaaagacatcccacagaatgcaagaaaatgttcgcaagctatgcatccaacaaagatctgatatccagagtctataaggaacttaaaaaaaaatcagcagcaaaaaacaaatatccccaataaaaagtgggcaaaggacatgaacagacacttttcaaaagaagacatacaaggctgggaacggtgggtcacacccataatcccagaactttgggaggctgaggtgggtggatcacttgaaaccagtagtttcagaccagcctgggcaacatggcaagacatgtaatcccagcactttgggaggccgaggcgggtggatcacgaggtcaggaaatcgagaccatcctggctaacacagtgaaaccctgtctctactaaaaatattttaaaaaattagccaggcgtggtgatgggcgcctgtagtcccagctactcaggaggctgaggcaggagaatggggtgaacccgggaggcggagcttgcggtgagccgagatcacaccactgcactccagcctgggagacagagtgagactcggtctcaccaaaaaaaaaaaaaaaagttggccagatatggtggctcatgtctgtaatcccagcactttgaggggtgaggcaggcagatcacttgaggccaggagctcgagaccagcctggccaatgtggtgaaaacccatctctactaaaaatacaaaaattagctgggtgtggtggtgaacgcctgtaatcccagctactcgggagggtaaagcacgagaatctcttgaacctgggaaattgcactactgcactccagcctgggcaataaagcaagactgtcacaaaaaaaaaaaaaaaaaaaaaaaaaaaaaaaaaaaaatgccaatgaggcatattcactttcatccatcagtttgggaattcttagtactgtcggtatgagttgtcaaaaaagagaaaaaaatcaggcatggtagtgggcacttgtaatcccagatattcaggaggctgagacagaagggtatcacttaagccaggagaccagcctgggcaacatagcaagactccattccaaaaaagagagacagaaagatggtgaaatgcctaatataggttaagtgtttattagatattggtcagagtgaagcagaacatcattagaaagactataatctatatctactctgataaatatggtaacaggtcaacggggcaaagactgtctaaacctgttctgagtagtctatataaggcattcaaacacgcccatcatgagtagtgctctcgcagctgatttattaaaaagcattaattaatcacagaatgatttatatatatatagaactctttcaacttatgtactccgatttatttattagaaaagcactggaaaaccatgactgcacactataaataccacaggcaaatttcatattttcataaagtcatttaaaaagacgaaatctctttttgaatgcttactaataatcatccacttaatttatagtatagccttttaatcaggacattcttgaagggagatactaagtagaagctagaccctagggtttaaaaattttataaatatcttccagtattatcaaatgcccactagagtaattagaaaacaagtaagtgacaatgtctagtattctttttcaaactactcaggcccctttcttgtgagattcaaataccctcccttcttttttttctgactatacaataaaaatacaaatgtttttagggttctaatttttttgaacatacaatttcatttatttcttccttctctccttttatgattttataaaaaatctagttttcaccacacagtatgaggtggcagtgtgaatacctcaagtttgaaagaatcttgtggcaattctgtcataaatctctatttacaagaatcactactttactagtcatgcaaaatgaaaaagagcatgtgcattcacaaaagatgagtccaggtacatatatatgtacattaacaaaattagaagaaacactgtgagaaatgttaattgcctaaacatttttttctaaaatgtcctgtttaaaaacattttacagctcactttattgatttacacatagtaagcaattatcacaaagaaaaaggaaatactgagtaggattttattaagttactttctaagccacatttacatcaaagcagagcaccaattcgcatttttttatcctttccttagctttagagacttcaactaaaaagatgttttctctgttaaatatccccgtcatagaagaattcaaggaaaaaacaaacacatttaaactgctaatttggtgggttttgatgacgacggagtttcctggaaactatgtgcataaaccacctggaagaggaatttaaaaaaaaaaaaacaatgaaaaacctggtttactaaaaagacaaaagtggctgggcacagtggctcatgcctgtaatcccagtacataaggaggctgaggtaggcagatcgcttgagctcaggagctcaagaccagctcgggctacatagcaaaacctcgtctctacaaaaaaatacaaaaaatacaaaaaatttgctaggcatggcagcatggacctgtagctttagctactcggaaggcggaggacggaggatcgcttgaggccaggaggcagaagttgcagtgagctgaggtcacgccactgcactccagtctgggcaacagagagagattctgtctcaaaaaaaaaaaaaattacttcaatttgttttcaaattgaccacaaaacctgttttgttttgttttttttttttttgttatattaaagaaagagtttaaaaatgccaaaataatcaggcgtggtggctcactcctgtaatatcccagcactttgggagccaaggccggcagatcacctgagctctggagatcgagaccagcctgggcaacctggcgaaacactgtctctactaaaaatacaaaaaattaactgggcatggtggcacatgcctgtaatctcagctacttgggaggctgaggcataagaatcacttgaacccggaaggaggaggttgcagtgagatgagattgtgccactgtactagcctggatgacagaatgagactctgtctcgaaaaaataaataaaaatgccaaactggagaaaactaggtcgtgtccagattaaccttgccccagccagcaagttttgctttttcttctgtgttggaccggactgtcttctgcatttgaggggactttgctcacatctcttttaaagcacttatttgggagtagcataatgactttacaagcctacctcttccaggccacagcctcatttatctttgtgtggtatagcacatctagtcggtactataataaatgctaattcagtgaacacaactaggaaaaatgtctagttttcaagcacattaaataactcttgttttgaaaaactaaacagaaaaagaaagaaggtctctgttggtagagagcaaattagactgtaacacagcaaaatttattaactctcagttatgtattaaccagtagtgtcatgaaaaaatctttagaagaaacaatacttggtaaactgaagttcagctcaaagggggcagggatgacattaatacagatcagtaatttctcatattcataatttttttttttttgagacagagtttccctctgttgcccaggctggagtacagtggcgcaatctcggctcactgcaacctctacctcccaggttgaagcgattctcttgcctcagcctcccaagtagctgggattacaggcatctgccaccaggcctggctaatttttgtatttttagtagagacagggtttcaccatgttggccaggatagtctcaaactcctgacctcagggtgatctgcctgccttgccctcccaaggtgctgggattacaggcgtgagccactgcacccaacctcatattcataattaaaggaaaataggaaaattttatattgacttaaattaatgcttttttttttaaagagacggggttttgctgttgcccaggctgtctgcaaactcctgggctccagtgatcctcctgcccctgtcttttaagtagctggtattcaggtgtgcaccgatgtgacacgctctcaaatgaatttttaaaaattatttttcacaaaatgtactttcttttaaaggatctctgaacaaaaagaaagcataaataccactgagttgggttagaaaatgcatttaaagttaaaagaataaagaaagaggtatcactaagtcacttcatcttcacagaaattctgtgaaatgggtacactgtggttttagagatgaggaaacagtggcacagagccagggctactgaacgaggatttcagccaggataccacaagcaggcagtgtcactcgagagctcgagctctggaccactaggccacattggctttccagagaagcatgtgatttgctatctttatcacaaacaatgagagcaaacagaggcattaaaaatgcaaataaatatgaagatgaatttctttatttcctttttattttagagacaaagtctccttctgtcacgcaggttggggtgcaggggctgtataaccttgaactcctgggttcaagtcatacccttacctcagcctcccgagcagctgggactacaggcatgtaccaccatgcctggcagggtctctctatgttgcccaggctagcctcaaactcctggcctcaagtgatccccatgctttggcctcccgatgtgttgggattacagctgtgagtcacaaagcctggccaaaaatgaatttcttgctagccaaaataggtaaggctctttaaacacaacagcaggctactaaaaaagtgattgcagaattttattccccgaacttccatgtaccgctatccacagaaaggaaatgaatcatctctaaatatgccaacatgttaagcaaaactggtgtgaaaagtacagtaagccatactgagaagtgttgcttccaatctttgaaaaatatttaaggctatataccaaaaaataaataataaataataaataaataaatgttctacaagggtgtaccaaaaaaaaagaaaaatattcttattcaagtttattattccagcataaagccaggaaaatatgaaaatatgaaaacagtctgcagttatcaatttatcacataatatacaaataaatacatttctatcaacagattttttagtgtatcttctcagtgcttcaaatgcctactgtataagattcccctcagtaattcaattattctacaacaagctggtctttataggagaagtatttattctttcaatctacttatcagctaactccctttgttcctatattttaatacaaaaaaataaggttgttttttttttgccaataaatagatgtgtactctctaccaaattactttaatctttttggaccttagttttctcatatgtaaaaattggggagaagtgctgggggtgaagagagacagcaaatagaccaaaagaacttggtagttcccattcttttattcctgtagggctgctgagctattataaagtgtctaggaatgcacacaagcaccatgaattgtctgtagaccaaatacaaaaatagtttccactttacatactaaaattttcacatgtatgcagataacgtgatttgtaaatacaattttatattaaaataaaattttcaggtctacagaagcttatgttatcatgcctgtaatcccagcactttgggaggccaaggtgggaggatcactcgaggttagttcaagaaaagcctagggaacatagcgagactgtgtctcaataaagaaatattctttattagctgatactaaatgtagagctactagagctactattatttggaggcatgaactgttcaacatttaaaaaaggactcttgttcaagtccagcctggataacgtaaggagaccctgtttctaaataaataaataaaaagggctcttatatttgaaaatgtcaggagctactagtatagacggtttctaaaatccttctaagtgtaaaagctgtaatttacagtccattatttctttatccattattgaatataacagttaaatgttaccagctgtaattatcgtagtttttaacaagttaaaattctttacaaatcttaaataaaaagcaagtaaaaaatgtgttccaaagggttgtgtggaaaaaaaaaaaaagcatgttaagaaaaaaaaagccagctggataaattactaagggtgtgaaaactgcaattgatgaaatacttgtaatattaaatgaaatgaagaagcaaaattgttcattgcagatgactaatttcatatattgcaaataaataatttcatatacctctaagataatgacattcactaacaaaatgaataatcttacttgaataagcattaggcagaatagtaaaaatcctcataggttcaaaccttaacctactattaagatagactgtgaattctttaattcaaattactaaactaactagattcctgaaaatggacatgcaagaaatcactgagaacaacctacactataagaactactaaaaatagtgaatgtggcttggcatctggcttatacctataatcctagcactttggaaggctgatgcaagaggatcagttgaggccaggaattagaggtcaatctgggcaagatggtgagaccccatctttacaaaatatttttaaaaattagccaggtgtggtagcctgtgcctgtagttctacctactcaggagactgaggtgccaggatcacttgagcccaggaattcaaggctgcagtgagctatgactgcactactgcactccagcatgggcaaatgagtgataccctggctctaaaaaaaaaaaaccgttaatgaatatacttcttctgatactaaatatgtcaatatttagaatgtaatattcagtgattacaactgtaaaggcaaaacacacagaaataaccaccaattcctctgtagttctctactaattcaattttgcatcctctgagactatatgtcttttcttctcaaacatcccacaatgccaaccactgtctccagaaataactgaattctgcttcatgatctgccaacaaaacagaagccaaaaacagaagataggaatttgttaccttttggctaccaaatctatctgcatttgtgcctatttttttccctttccagaactgatgaaatgtctattttcctattttagacaggtgatctaaaagctactacttttttttcttttttcattcctttcattggctccttcttttaaattatcaatcttatcttctttactaaattcattgccaaaagattacaaaaatgctatagagtcacctaagctaaaaaatcccttcaaagactttttatcctcctttaggtgccaccccaaatctttgctcctcttcacaccaaagttctttttttttgagataggttctctgtcgcctagacaggagtgcagaggtgtgatcatgactcactgtaacctcaacctcctgggctcaagtgatcctcccctcttagcctctcaagtagcagagactataggtgtgtgccatcatgcctgggtaattaaaaaaatttttttttgttgaaactgggtctcactatgttgcccaggctggtctcaaactcctggcctccagcattcctcccgccttgggctcccaaagtgttgggattacaggcgtgagccacctcgcctggcccaatagtcaaatttcttgataagagttatccacatattctactttcatttctttacctcccatgcccaccccaatctggaatttaacattttatcacttttatcagagtcaccgttaacctccatgtagccaaattaagaagtcttcttgaacttaacttctggccttatctgatttagtttattgaattgctgctttgtttaaaaattcaatttatttaacttttgaactagtaattcaaagttacatgctcaatttacatgctcaaaaagtataaaaatgaatacagagaaaagtctcctatactatccactgagtttctctccgtgaggtaactattattgttagtttccttttcattcttctaggaattcttttgcgtatgtaaagcaaatacaattacatattcttattctttccccacttttacacaaatggtatttatttcacttaacacatcttgcagatttttctatatcattatatagtgtcctcatcctttttaacagctttgtcaagatatgattcacataatattgagttcacagagaatgtaccagccatatcatatggtaagtatacaattcagccaggcacagtggctcatgcctgtaatcccaacactttgggaggccgaggcgggaagatcccttaagcccaggaatttgagaccagcctaggcaacatggtgaaaccctgtctctacaaaaagtagctgggtgtggtggtgcgtgcctgtagtcccagctacttggaaggctaaggtgggaggatcgcttgagcccaggatgtcactgaagtgagcctgaagtgagacataatcgggccactgtgctccagcctgggtgacagagtgagactctgtctcaaaaaaaaaaaagacataattcagtggtttttttgtatattcacagaattgtgcatctatcaacactaatttctgaacattttcatcaccccaaaaagaaatcccatgccacacccagccaatgtatcattttatacatatgccagcagcagtacttcccaaactttaatgtgcacacggatcaatataaaatactattagtccaggaccaggtacggtggctcatgcctgtactttgggtggatcacttgaggtggatcacttgaggtcaagagttcaagaccagcctggccaacatggtgaaaccctgtctctactaaaaatacaaaaattagctgggcatggtggcacatgcctatgtaatctcagctactggggaggctgaggtagaagaatagcttgaactcaaagtggaggttgtagtgaactgagatcacgccactgtactccagcctgggtgacagagtgagactccacataaaaaaaaaaaaaaaaaaaaaaactcagctgggcgtggtggctcatgcctgtaatcccagcactttgggaggccgaggcaggcagatcacaaggtcaggagattgaaaccatcctggctaacacggtgaaaccccctctctactaaaaatacaaaaaaatcagccaggcgtgatggtgcgcacctataatcccagctactggggaggctgaggcaggagaatggtgtgatcccgtgaggcggagcttgcagtgagctgagatcacgccactacaatccagcctgggcaacagagcgagactctgtcttctattagtccttcctcctattacgataattaagcaaaacatctcaaaaagcagcttaattgtatatttcaattctcaattgaatatatattgttttattttcactttaacttttatatttattgttattttattaaaataaaagacagtaataaaaggtgaaatgccatgtttaatcagaattcctctccctgtgtggctgaaatgatggtaaggtcatcctaattatttctattttgttcaacatgtttcaagtaaagcaagtgactgaaaacttcagagtgaatatgaacaaattcctaatttagtgactatggaaagcaagtaattggactaagataaaagacaaatacacttaaagggcctcataaaaagaatttcaacatactttttaaaaagagtcaactttagacttcttttaatagcccaccttagttgctggggattttcatggataccaaccacccagtagtgatcagattttcctttgcagtgctctcttgtattacatataggagtccacgtattaccaagtcctctgttaagcattcgaacaattccttctgaatccacgtaacaaggggtacctaaacaccaacagaaaaatcacttggagacatagctacatgttgttaaaggaaccctatttcaaatatattatacataccaaggattcaactttgctttcaaaagcaaaacacaaaacagaagcaaataatctaagattattacgtaaaatttcattaaccatataaagtaagacctaactaaaaaaagaaaaaacattggatttgatatgactaaaatttacacaaataaagtgaaaaaactgagtttcagtgaaaactatgccacctgctggaagataataataatttcatttatttatttatttattattattattttttttttcgagatggagtcttgctgtgtacccaggctggagggcagtggcgcgatctcggcccactgcaagctccgccttccaggttcaagccattctcctgcctcagcctcccgagtagctgggactacaggcacccgccaccacgcccagctaatttttttttgtatttttagtagagacggggtttcaccatgttagccaggatggtctcaatctcctgaccttgtgatccacccgcctcagcctcccaaagtgctgggattacaggcgtgagccaccgcgcccggccgataataattttaaagccaattttagtaaaaaattaaacatgaatcagaaggctcccgcttgagaaacatttagaaaaatgaccaaaatctgatacaaagtgatctttacgaaatttatctttagtactcttcttcctctctcttctttttgttggccttgtcactactctgtccccaactactaggtaagcaattcttacctcgtaaaacagggaagcattcttgttttccacctattctgcttccaactcaggaaatctgtggcaaattacctgattatcccttttcttatctgtggcttcacacccccctcactctgcaaacattagtttccgcagggtctggatctaattggtacttcggagaaaaaaatctatacaaatggaagttatcaatggttcatattattaaagcctgaatgactaatagaaaacacatttagaaatggttgatattttaaagacaaagtggagtttccagcaatgtaaatgaagaacatgaatctccaaaaagagaaatatttaagtccccatgagacagagatgacaggtgatttaaaataaggtactcctgggccaggtgcagtggctcactcctgtaatcccagcactttgagaggctgaggcaggtggatcacctgatgccaggagttcaaaaccagcctagccaacatgacaaaaccccatctctactaaaaatacaacattagccaggcgtggtggtatgtgcctgtagtcccagatactcgggaggctgaggtacgagaatcacttgaacccagaagacagaggttgtagtgatctgaggtcacatcactgcagtccagcctgggtgacagagtgagactctgcgtcaaaaaaaccacaaacacaaaaacaaataaaataaaataaggtactcctcagtgtctttcaaatcatctgtcataagcctctagaatttggtctaaaatagcacttatccaaaagaaatatcatgtgagccacaagtgtaatttttaatttcctagtgccacattaaaaaaaaaatggctacataccatgtatctgaacaacaaaaaaaagttaagtgaaaaaatttaggctgggggcggtggctcacgcctgtaatcccagcacttcaggaggtcgaggcgggtggatcacatgaggtcaggagttcaagaccagcctggccagcatggtaaaaccctgtctctattaaaaatacaaaaattagccgagtgtggtgacgcaagcctgtaatcccagctactcagaaggctgaagcaggagaattgctggaacccggaaggcagaggttgcagtaagctgagatcgcatcattgcactccagcctgggcaacagagcaagactcctaatttattccttaaaaaaaaaaaaattttaaatagagatgggatctcactatgttgcccactctggtcttgaactcctgggctcaagtgatcctcctgcctcggcctcccagagtgctgggattataggcatgagccaccatgcccagccaaaaaaaaaattatttttaaagaaaaaaaggatgaagttaatgttaataatacattttatttcatcgaagatatctcaaatattatcatttaacatgtaatcaacataaaaaaattgatttttatatcttttttcatgctaagtcttcaaaatccagagtattttacacatacaagcacatctcagccatatttcaagtgctcaacagacacacatactagttattgtagtaaacagtgaagctctagaaaattctaagttttctgtatgatctgctggaaaagacacaacttattattgatttgtatcacctccttgctatttaatactttcagaaaaatatatttccttctttataagttttctaatgagaattctcatgaagagagctcttagccgggtgcagtggctcgcgcctgtaatcccagcactttaggaggccaaggtgggtggatcacttgcgcctaggagtttgagaccagcctgggcaacatggcaaaaccctgtctctacaaaaaatacaaaaattagctaggcatggtggcacatgcctgtagtcccagctactaaggaggctgaggtaggaagatggcttaagcccaggaggtggaggttgcagtgagccgagatcatgccactgcactccagcctggacaacagagccagaccctgtcttaaaagaacataaaaataaaaacaagatcttatacataaaacaatggctaccttgcctaaagattgcagctcccagttctgccaacatattaaaatagaaatttaaaatataaaatagagataatttattcttaaattaattaggaataaaacaatgaaataattttcttcttgaagaatatctaacactttatattatacttgttttttttaaacaaatttatcttgccttcagctgaaaacccaatccatgcaaggtaggatttccttgtaagaggaagagggtcaccatgcaaaatttgttttttctttttccccagctctagcagttgaactccaaggcactgatccccatcaaatcctgtacctaatgagaaaatgtaaatataaatcaggcatcaaaggttatccaactataacgcagtctaaattattttctgtgaattgattttgtggtaaattactagactgactagcactactttttatgaataacccatccaactgaggcatcattcaggtattagaaacacagtaagatgttacatggactcttcacataaagtccttataagtgggcatttattcactcaagacatatttacagagagcttactacacgccagcattggcctagatactggggctacagcaataaacaaagtcaccactcttattaaattcaaatttcaggtagaagacaaattaaaaaacacaaaaagaacaaaaaaattatcacaaagttaaaataatgtgatacagaatgtcagagtggtttgttagactggttagtcagaagtgacctctcagaaagtaaagtttaagctgagacatgaactgcaagctggagcctgccatgcaaacattaggggaaggaacacggaagtggatggagggaacagctaatgcaaagtcctaaggtaggaagaatggagggctcgaagaacacaaagaggcagtatggccagaacatggtaatgagaaacaacggtaagagatgaggttggagaggcaggcaaaggtcagattatacgggatcagtagatcaccttgacagctatcagaagtttgactttgattctaaaagtgaaggaaagtcagagggatttgagaagaggagcatgatctatatttttaaaagatcacctaggctgctctgtggagaatggactgtggaaggcaagaactgaagctaaaagactagttaggaggctactatgacagtccaagagatgacatccaggttgtattagcagaagaaatgaaaagagacaaatttagaatgtgttattccatagaattgacatgatgatataattttactgttggagttgatgcaggggaaatggaaagagaagaatcgaggataatttttagatttttggcttcagccactagattgttagtaagccatttactaagatggggaaactacataagaagcaagcttggaaggaaaaaaatcagtttttattgtgagcaaattaagtctgaaatgtctgtccaaactctaaatagatttcaagtaggcaactggatgtgtaagtctggagacacaaggagagggtagggttggtgctatcaacttaaaagtcatagacactgagatgtatttaaagccatggattatgataaaattccccagggtggtttctcaaactgcatattttgacctaagagtcatggaatcaattttaatttgcaactagcattttaaaaaatgaaataaaaaaatttaaactgatatcaaaagagtaaacattgtccaggagacttttatttcagttacatttgcagatatttatagaacagttatatagaatatatttcttttcttctgtttttcttttaaaaatagaaacaggggcttgctattgctatccagacttgtattgaactcctgggctaaagcaactctcccgcctcggcctcccaaagtgctgagattacaggtgtgagccaccacaccacaccacaccatacctggtccagaatctatgaatctatttcttactgtggcaaagcagacaaaaagactgaaagaccctgacctagagagtagtagagaaaaaggggatacactccagctaaaagatagagccaacaaaaaagtaaaaagggagctgccagtgaggaaaaatattgaaagtatgatgtcacagaagtcatgagaagaaggtattttcaatggaattatttttttaaaaaagcacagagattatcggttaccttgataagaccagtcttagcatagtgacggggactgaagaaagacatgaggggaggaaaaaggaggcagcagcttttaaaaagtgtcacattcagagttgttttggcccttcctactaggagttatttttgtggaatttcaacgctgaaagttctctggtcgtgcttgccaaaatggtaagatttagacatggaagtaattaaccaaattccaccttggaattctctctataatatagttctattaagaaacattttcattttcattgctgctagtgaacacaacaaaattatctacatttaaagattacacggattcaaaaggaagtatataatccaagacaaaaagagtaacaaaaacagcaaaaaagctcaagtaatttccattttacttcaagtcataaaagactgaaaaaaatctacctctgtgataaacaatgaaaagctgttctccatgtcctgccattgacaccacaggtccagcaaggctgaatacctctttttgaacccctccaatagtaaacaatcgaagaagcagggcactagtagcggcagcagcccatccttgaccgagacatatggcttcaatatcctcattctgaggcaagtctattatccactctttgcttgaatcccaagaactaaagtgcaggcagtgaagcttgctaaaaattaaaacaagacagaaacaatcaaactttcatatgatatttacatatatatatatataagcaatcatgatattcaacaaaaaaaccaaatagtttacttcctattatacactagtataagaagttgctttaaaaaagtaattatgaaatacccttaaaatgaactatattgatatctttccagccttttttctttgcacatacatatatgtaagttattattaaatacaaattctttttttttgaaatggagttttgctctgtcacccaggctggagtacagtggtgtgatctctgctcactgcaacctccgcctcccaggttcaagcaattctcctgtctcttgcctcagcctcccgagtagctgggactacaggtgggtgccactgcacctggttaatttttgcatttttagtagagatgcagtttcaccatgttggtcaggctggtctcaaactcttgagctcaggtcatctgtccgccttggcctcccaaagtgccgggattacaggcgtgagccaccatgcccagcctgaaggatacaaatttcaaatcacatagaagatagtaaaatccatgaagtgtatcagtactataatcagctgaagaagggatcaagagagggcaatctcttgattaacaaaaagctgaaaaaatattttcttttcttttgaaaagaaaaacattctgcacccattgctttcccatcataatttttttcttgacatctatctacctatttacttacctacctacttatcaaaacatgtaaacatccaaaaaatattaagtagaaaaagcaaacgggtgactagtacattttttggtttgtttttccgtttttttttcctttctcgaagagagattttaaatttaatccatcatgacaaaaatgtagattaatagttggccaaggctcaggttgaattaactgcaaagggatataagaaaacattcttgggtgataaagacgtagtgacaaaaatctagactaatagttggccaaggctagggttgaactaactgcaaagggatataagaaaacattttcgggtgataaagaacattctgtattttgattgtggtaggggttatctgtgtatatacacctttgtcaactcatcaaatgggtgcattttattgtaaataaattacatctcaataaagtaaattaaaataagggaggttcaaatagaaagaaatctggaaggatacatatcaaattgtaaatagcagttatatctgagagtagaattctgggaggagttttcattttccgaaacttctatactgtatactggttttttttctttacaatgaatgtatattactcttataatagtaaaaaaaaaaaaaagcacttaacaatgtaaaaaaaaaatcccatctcttgcattactaactatgccatgtcattttgctatgtagttagagcatgtaatgagggaatcattatggcaaaaacagacatatgttctgaggtattttgggtgtgctggtgtttgtaccaaactcttctgaaatttcatattacaaaaaataaattttgttttattaactttttgtctttaatttcaacaactgtatctaacagttcaacagtgccaaattcttcctaataatcttgagtttaccttgctagttcatcagtgctttcacatgccaacaaaatagcttcgtgggaaagatctgctattgtataattcaaagtgtttgataagtgtgttgcatggtgtatggaggtatcatggaactccacatctatggcattgtcttgctcatcattatagcagcgaataattccaatagagttccacacctacaaacaggtaagattaaatataagtctgagaaaaactgaagctcctagaatcagtaagccacagtagtacaaattaacaaatattataattaaatttgtattaagatttaggttttgggagttactacatctcatctatctctaaatagtttctgacaggagtcataataccagagctacaattacttattatttccttggtgagaataagatacatatatacttattaattagcaaatagagtatttaataatatttaaaaataaattacatgactgttactttaaaagcacattacagttgtcctttgaacaaccaaaccattaaattcctcaaaagaaatatttcaaaaattgagttttcttacaaatatggatgcaaataacaacagacttttttcctaactattctatgataaaataaatacatacattttaagaaaacataatttttttttttttttggagacagttttgctctgtcacccaagctggagtgcagtggcatgatctcggctcaccgcaacctctgcctcctggattcaagtgattctcctccctcagcctcctgtgtagctgtggttacaggtgcatgccaccaggtccagctaatttctgtatttttttagtagagatagggtgtttcaccatgttggccaggctggtctccaactcctatcctcaagtgaccaacccaccttggcctcccaaagtgctgggattataggcgtgagccatcacgcccggcagaggcaacataaattgataccacttggaaaacttatcttccactgatgtccattataggctcacactaggccctagagtttctaataaaattagtgccaatattttatttaacataactataaataaaatattgacactaataaaaaaattaagacctatgacttgatgactactgatagcaataaaaagttttattaatattaatcaccacccttaatctttacataaaaatttatgccaggcctatactcttcaaatttatgccaggcctatacttttaaaaaggcaaaatcctcagaatggaaaacatcatataaccaacacagaaaaactaaactttttaagaactcaggccaggcgcggtggctcacgcctgtaatcccagcactttgggaggcctaggcaggcggatcacgaggtcaggagatcgagaccatcctgtctaacatggtgaaatcccatctctactaaaaatacaaaaattagctgggcatggtggcaggcacctgtagtcccagctactcgggaggctgaggcaggagaatggcgtgaacctgggaggcggagcttgcagtgagcagagattgtgccactgcactccagcctgggcaacagagcgagactccatctcaaaaaaaaaaaaaaagaactcaaatctaaggcaaaaagccaatatattcattttgtctattcatgaaatatatatttaatgtgcactgtatcataccttgttccaaatcctaagaacatatcagtaaacaaaacaaaaatctttatcctcgtgtagcttacattctggtgggtggtggagtgaggaaaagggtcagacttttccccccatagtacttgccaccttctaatatattatactagtagttgccttctaagaaagcacctccttactagtgttttggagtcagtataatcttctatgtaacaatgaccatgaagaataaggtttgaaagtattgccaagaaatattgcaagatagtaatatttacttatgttcatttaatgtcattttggaaagcagaattttatttaacatcattttcaataaggttgaaacaagattaaaactgtgagctaaccataaaataaaccaaccacaaaactgtaatcaaccaaagtgctccaggctacttaatcaaagtttttaaaaatatgttttatccaaaaaaattaactatagtaagaaaaaagtgctgaaaacctactaagaagttaagtgtagatccaagtcttaccatgaatctgtgagtgagatgcaacggtgtagaacctgactgaaatggcttttgccggggagttggcatgggtccatcataaaatggcctttgggatgttacaagtggtagattgtgaatgctgccttcttgaccatcttcctcctcctctttgagaagactagaaccagtttttagcattgaaatatctacaacacaaaggatcataattaagggaatcacgaataccaatgatttggaaaaaggaaagcattatggaatctagtaactttttcattcatattcaatgacactgacatgctatttgcctctttcactgtgttaaagagatgcagtgatggtgcaaaagcaatggtgggtaaaattcctggtgccttggcaccaatcaaggcagtggcacctaactgtattagtcgttactgcattgttaaccactactcacttgcagtaaaaatattaattttattaaatcttgacgcttacacagattttttttttaaagttctgtgtgctaaaatgagaagtgtgatggttgtcttgaaaaaaagcacttatgcaattgtttgagttgtaagctgaactaagtgattttttttcatacaacactacttttacttaaaaaacacatgccagataaactacggttatgcagaattggatctttggcaaacattttcttgtaaatgaatgaagtgagcctatcaattaagaaaaaataactggcagaatttgttgccaatgataacatttgagctttcaggccaggcacggtggctcacacctgtaatcccagcactttgcaaggccgaggcaggcagatcacttaaggtcgggagttccacgttgaccagcctggccaacatggtgaaaccctgtctctactgaaaatacaaaaattagccaggcatggtggcacatgcctgtaatcccatctactcgggaggctgagacaggagaatcgcttgaacccgggagactccgtctcaaaaaaaaaagagctgggcacagtggctcaggcctgtaatcccagcactttgggaggccaaggtgggtagatcatttgaggtcaggagtccgagaccagattgacctacatagtgaaaccccgtctctactaaaatacaaaaattagcctggcatggtggcgggcacctataatcccagctactcaggaggctgaggcaggagaatcacttgtacccagagggcagaggttgcagtgaaccgagatcgtgccactgcactctaggctgggtgacagagcaagactccctctcaaaaaataaaaacaagaaatttgagctttcaattaaaaattaagatattggaaagcttctatttgccattatgagcttcacaactttctaatacttagaaactactgatgagattggtaacaacactagcagatataatttacagccaggtgctgtgactcacgcttgtaattgcagcactttgggaggctggggagggaatatcacttgaggccaggatttcaagaccagcctgggcaacaaagcaagattccatctctacaaaaaataaaaaattagatgggcatggtggcatgcatctgtagtcctagctacccggaaggctgagtgggagaactgcttaagcccaggagttcaaggttacagtgaggtgtgatgataccactgcactccagcctaggtgacagagcaagatgctatctctaaaaacaaaaattaattaattaaaaacaacatataattaattaaaaacaaaaacaaataatttatattagataataaaaagtgtcagtataaagaggatctataaacttcagtgaaccaatattatcaattcatatgttacaaaattaaacatgattttaaaaaatccattcaacattcaagtcagaccaatgaattttttgattttattttgtttttttctgagacagggtctcgttctgttaccctgcctggagcccactgttgcaatcatggctcactgcagcctcgacctctcgggctcaagagatcctcctacctcagcctcccaagtaggtgggattacaggcacacgtcaccacacctggctaatttttaaagtttttttgtagagaggaggtctcactatgttgccctggctggtcttgaactcctggcctcaagcaatcctcctgcctgggcctcccaaagtgctgggattacaggtgagagccaccattcccagccagaccaatgaatcttaacataacagagccgtaagagttcactgaagttttcagattacactttgcaagtaatctttaggaaacgatcatcttctgagtcttggtgcaacatcaaagaatatccacaattaattgaatgtgctattaaaagatttcttaaaatacttctcccttttcaaattacatatttatgtgaggccaaattttctttatacacttcaaacaaaaacaatgtatagcaatagacttaatccagaaaagtagatgagagaatccagctatcctctatgatagacattacaaagattgcaatgccactcttctcactaattttttttgtttttcataaaaaagtactattcatgtttacatgagtttattaatgttatttttaagtgaataaatatttttaaatttctgaattttaatttctaatatgtaaatgacgatagccgtaactctgtataaataaatgctctcggaagggtcctcaaaattttttagagtataaaggctactgagaccaaaacatttgaggactgctgttctataaactctatatgactttaaaaagcacaacatagcactgcacattggcattttacttgataatgttcaagtgttattgtagcatgtaagttgttacaataagcactctatttgaagattttcaattacaatctcaatttcttcattttacttgataatgttcaagtgttattgtagcatgtaagttgttacaataagcactctatttgaagattttaaattacaatctcaatttctttaatagatacaatactattcaggttatctattacttcttgagttagcagtggtactttgtgtctttcagaaaattcgtctatttcatttaagttgttaaatttatgggcacaaagttattcataatattgccattatgcctttgatattaatagtagcactgccatacagacatataatgtgagttacagctgtaattttaaattttctaatatttctaaagtttaaagagtaaaaagaaacagccataatcttaataatatagtgcatttaaaatacatattatcatttcaacatgtactcaatataaaaaatttcccaagatttttacattctttttttcatattgtcttcaaaatctggttgcactccatggtgaaaccccatctctactaaaaatacaaaaattagccaggcgtggtggcgcatgcctgtaatcccagctactcaggaggctgaggcacaagaatcacttgaatccaggaggcggaggttgcagtgagccaaaatcacaccaccgcactccagcctgggtgacagagtgagactccgcctcaaaaaaaaaaaaaaaatccggttgcactcataacatatctcagtttgaactaaccacatttcaagtgctcaacagctacatgtggctagtggctactatatattggatagcacaaatctacagatctatagtgatggcccacctctctttcattctctatgttagtaatttgtgtcttctctttattgatcaaccacgatagatatttattaattttattgatcttttcttttctttggagatggagtcttgctctgttgcccatgctggcatgcagttgacgcgatctcggctcactgcaacctccacctcctgggttcaagtgagtttcctgcctcagtctcctgagtagctgggattacaggcacgtgccaccacacccagctaatttttgtatttttgtagagacagggttttaccatgttggccaggctggtcttgaactcctgacctcaagtgatctgcccatttcagcctcccaaagtgctgggattatagacgtgagccaccgtgcccggccttattgatcttgtcaaagaaccagcttttggtctcattgactttctctataggttttctgttgtcaattttattgaattttgctctgtattatttccttccatttgcttggggtttagttttctctttttctagtctgccatagcagaagcttggattatagatttgaaaccttttttaacaaagtcatttaatgctataaaatttcctctaagcaccacttagctacattctacaaattcaataatgactttaatagtgttaataaaaaatctaaaatattaatcaacagggtaatcacatgcacaaagtcaaattcttaccaactgagttttcatcatcttctaggatgtgacttcgctgtctaggacgacctgaagccatcatgaggtcttcatcatcctcatcatcatttataatcccttttgaaaaagaagggatctcaactgcattgtcatttagaaaatcaccagcattactcatatcatc

SEQ ID NO: 1373 - DNA, 312 bp, Homo sapiens
tttctttttctttttttttttttgagacggagtctcactctgtcacccaggctggagtgcagtggcacgatctcggctcactgcaagctccacctcctgggttgacaccattctcctgcctcagcctcctgagtagctgggactacaggcacccgccaccacacccggctaattttttgtattttttagtatagacagggtttcaccgtgttagccaggatggtctcaatctcctgacctcgtgatccgcccgcctcggcctcccaaagtgctgggattacaggcatgagccaccgcgcctggccgaacatc

SEQ ID NO: 1374 - DNA, 140 bp, Homo sapiens
ttttttgtaatttttagtagagatggggtttcaccatgttacccaggatggtctcaatctcctgacctcatgatccacccggctcggcctcccaaagtgctgggattacaggcgtgagcccccgcgcccggcccacaatc

SEQ ID NO: 1375 - DNA, 167 bp, Homo sapiens
tacaggcgcctgccaccacgcctggctaatttttgtatttttagtagagacggggtttcaccgtgttagccaggatggtctcgatctcctgacctcgtgatccacccgcctcggcctcccaaagtgctgggattacaggcgtaagccaccgcgcccggcctgaaatc

SEQ ID NO: 1376 - DNA, 5667 bp, Homo sapiens
agagcgactctgtctcaaaaaaaaaaaaagtgacagagaagcaaagaagctgcaaagaccttcacaataggccttaaatgatatgggattagacaaaggtctgatggaggccaagggcccatacccaggcaagtaccaaggggactcagaggcagccaatgcagcagataggagcagtcccactgggatctggagaccacttgcagtgaggggtgccataagggtgtggattctgtcacctgagtaggtctgcagtgagggtcagcaggaaccaggaaaacctccataactcgatctttcttcaagggcagtggcagcgttagatagcaaaatgggtcaaaggtcacagaaaccttagcacattctgggcaaaccaaagtagatttgaagaggccatggaaagtatccacaatcacagaatcattcctcaacctgtgattctcccaggcttcctttgccaccacctgcgtcaaagggataaacaggacattctcaacacctctcagccccttgcccctgcatccagaatgactcacagcaaacctggagatgaatcaggtggcaatctgtacagccaagagcttgatccaggacaaacaaggccaggactactcttagtgtatcatactcataccacatgccagctctacgcccaatccccaccccaacacacatatatatatttcacatatatgtttatatatatacatatttcaaatatatattatattgattgattgagacatggtcttgctctgtcgctcaggctggcgtgatcatggttcactacagcctcaacctcccggactcaaagcgatcttcctgcctcagactcccaagtagctaggactataggcatgcatcaccatgcctggctaatttttttaggtttggtagggatgggggtcttactatgttgaccagacagttctagagctcctggcctcaagtgatgctcccacctcagcctccaaagtgctggaaccgcaggggaaagccactgcgcctcgccctaatcctcacacttaataaggttggcaacataggacctattggaaactaggggtctgtgtgtcctgataagaaacagaagcccggagaacactatcggtacagagacatggccagggcaaggaaagcccccctatatgtttccagtgatctaaagtaaggtttttggcggggcacggtggctgacgcctgaaatcccagcactttgggaggccgaagcaggcggatcaccagaggtcaggagttcaatatcagcctggccaacatggtgaaaccccctctctactaaaaatacaaaaatttgctgggcatggtggcacgtggctgtagtgccagctacttgagaggctgagacaggagaatcgcttgaacccgggaggtggaggttgcagtgagccaagatcacgtcattgcactccagcctgggcaacagagtgagactccatctcaaaaaaaataaataaataaattttaaaaataaagtttttatctatactacagctcagctaactcatagtttttctaagaagatctaaattttactttaaagcattcatattgattatcccaatgtgatagggtagctgaaatactaaaatcctcttgcactgatcagataatcaaggcaaaaggtataaatgtcctaatgatactaataacaaattaagtaatcatggatggattttattgtgagcaataacaatcttaggggtcctcactataggtactttacagttttcagagtgttcttagtccctagttcaccagtgaaatatcaaacaagctcactctaatttgaaaaagcccaagaggaagccttaggagtaactagggtacagtgcctcacgcctgttgtaatcccagcactttgggaggctgaggtgagaagactgcttgagctcaggagctggagaccagcctagacaacacagcaagtttctgtctctatttaaaaaaaaaaaaaaaaaaagcagtaactacagttagcccctttctgaccagagaccatatccctataactagctacagtgagaagcaaccagggccctggcaacaacactcaaagaccagaagaatatccctgcactctcaataggaggcagcttctttggcatattatcattcagacatcattaatggcataccgcatctggccgcccattggcatccttcagctccaagtagggctttttctttacccggttcagatcttcatgcaatccatctagaagaaaggccagcagctcctgagaatcttgttgctggtagccagaaaattgaggagcaaaacgtcctacttgagtctacaacaaaagcaactgtatcagaaggcataatacgtaaagaactagttaaatcaaaaaagaattgccatcaaaaatagctctgaggagttagctggggcagtgagagagaacacttggttgagtagtccaattaactcctgaagagcctacaggaggccagtggttcccaccagaaagaaggcctagatcagagagccaggaggatgaacctggaacctgggccactgccctaagtcctaaggaggaagggtggagtaccctgagtaaccacacccaagtactgacatgaatccctctccaacatgtccttctttggttcagagtcttaaactccataaggacattacaaacaatactttcatcagctggaggaatcctcctgtacataacagccctcaggtccctaaatactgtctgtccagtaatactctccaccagttattctgagagtatggtccccagtcgcagcattagtatcacctgggagcttagtagaaaagcacattctcaggccccacaccaaacctattcaatcagaaactctggggatgggtctagcagtctgtgttgtattaagcactcccagagattgtgatgcatcctatggagaaccagccaggcacggtggctcatgcctatgatcccagaattttggaaggctgaggcaggcagatcacctgaggttgggagttcaagaccagcctggccaacatggtgaaaccccgtctctactaaaaatacaaaaattagctgggcatggtggtgcacacctgtaatcccagctacgcaggaggctgaggcaggagaatcacttgaacccaggaggcggaggctgcagtgagccgaaattgtgccagtacgctccagcctgggcgacatagcaaggctgtctcaaaaaaaaaaaaaaaaaaaaaaaaaaggagaaccactgttctacacctgttctctaataccatagccactagccacatatggcaattgaaatttacattaattacaattaaaaaccattaaaaattcagttcctcggtcaaatgaaccacatctcaagtgctcagaggtgcttgagctggtagctaccaaaacacagtgcagatatataacacatccatcactgaggaagctccacacttccctaatacccctaaacactaccttccagttgtttatttacattagcttcagcacagtgtgttgccacccaattcttttttatttttttttctgggacagggtctcactctgttgccaggctggagtgcagtggcgcaatctcagctcactgcaacctccgcctcccaggttcaagcaattctcatgccttggcctcccgagttgctgggattacaggcatatgccaccacgcctggctaatttttgtatttttagtagagatggggtttcacaatattggccaggctggtcttgaactcctgacctcaagtgatccacccaccttggcctccccatgggctgggattacaggtgtgaggcaccgcacccagccgttgccacccaattctagtttctttgtgacttagtatgtgaacagtcatttatatatttcccagggattcatgtgaccaaggggatgaaagataattagttttcaatttcaacaaaccacctgagattttagttttctcactgagctaaggtgctattttttttcctctctgaatcataaatatgcatgtcttttcttatcatatgcttcatgaagctccatgaatcccagtggtacaggctaaataggatctttcagatttcagcttaaatctgctgagcgggagggagcaaagcacctccacctcagcaggaaaaagcagttggggcaatggaaagcccaagttgctccgagtgtatccatgtcttctccttaaaccttcctggctgagggaccccagtgataactgcccctcacatcaccttccaagaatgtgagcccaattcctgacttagggggtcccaactcaaaccacgaagcctgtagaatccaggctcagagaacctggaaacagccttcagatgatactagaaattaaactgaattttcattttttttagagacagggtctctgtcgccaaggctgggtacagtggcacaatcacagctcactgcagccttgacctcccaggcttaagtaattctcccacctcagcctccctggtagccgggactacaggtacatcaccatgtccagctaattttgttgttgttgttgttgttgttgttgagacagagtctcactctgtcgctcaggctggagtgcagtggcgtgatctcggctcactgcaccctccacctcccaggttcaagcaattctcctgcctcagcatcctgagtagctggaattacaggtgcgcaccaccacgcctggctaatttttgtatttttggtagagacggggtttcactatgttggtcaggctgatctcgaactcctgacctcgtgatctgcccgcctcagcctcccaaagtgctgggattacaggaatgagccaccacgcctggacttttttgttgttgttgttgttttttctttgagacagagtctcgttctgtcacccaggctggagtgcagaggcgcaatctcggctcactgcaagctctgcctcccgggttcacgccattctccttccccagcctcccgagtagctgggactacaggcgcctgccatcacacctagctaattttttttttatgtatttttagtagagacggggtttcaccatgttagccaggatggtctcaatctcctgaccttgtgatccgcccgcctcagcctcccaaagtgctgggattacaggcgtgagccacagcgcctggcccagatcccatcttaatcccaaaatgcaacgaaaggaatgcctcataacaacactaaaccactctccccaaagtgggaaaaaggaagtacgggagagtatcccttatccaaaaatctgaaatccaaatgcttaaagatccataacctaacactgacatgatattcaaaggaaatgctcactgaaacattttagattttggaatggggatgctgaactagtaagcataatgtaaataccataaaaaaaaatcctaaaaaacctgaagtcccgaaacatttctggtcccaggcatctatatacagggatacccaacccatatatatatatgtctacctactttgaacatgcgaggtgccacatgggcgtcccttccagaccacatctgcttaatgagttcagcataggcttctgcaatttcccctttcatccccagagggttgtctctgttgatttcggcttcatactcatctttgagaaagtagtcagtcagtggtgcagtgttgctcaaacactgaaa

SEQ ID NO: 1377 - DNA, 141 bp, Homo sapiens; identical to SEQ ID NO: 1371

SEQ ID NO: 1378 - DNA, 153 bp, Homo sapiens
caccacgcccggctaattttttgtatttttagtagagacggggtttcaccgtgttagccaggatggtctcgatctcctgaccttgtgatccacccgccttggcctcccaaagtgctgggattacaggtgtgagccacggcgcccggccaaata

SEQ ID NO: 1379 - DNA, 131 bp, Homo sapiens
tttgtgtatttttagtagagacggggtttcaccatgttagccaggatggtctcgatctcctgacctcgtgatccacccacctctgcctcccaaagtgctgggattacaggcgtgagccaccgtgcctggcc

SEQ ID NO: 1380 - DNA, 8247 bp, Homo sapiens
aggtttcttgccttgatgtactggagcaatcagatcacacggcggcttggagagtgagtgcaaggttttatgagtggaattagccctcagcagatgggggagccagaaggcagttggagtgggaaggtgattttcccctggagtcgggctgctgagcagcctgggctctcctctgaccgcccctgccaaactcatggttccatcagttgatggcctgctggtgcctgttggtgtgctttccacgtcctcttgacgtccagcggcttgtgtctctgcccactataaaaaaccactggggtttttttataggcacaggacggggacgtggcgggctcgggaaatgcaacatttgggcaaaaaaacagaaatgcctgtcctcacccaggtccctgggcacaggcctgggtgtggagccctggccagagaccacgccctcctctacccagcacttccctgcccccttccttatcatctggtcccttttctcagacaccacaacttccaagaaggatcactggtcctgaaccctgtgtcttgtccaggtgtggaccccagaaaagttggtcctggctgggcgcagtggctcacgcctgtaatctcagcactttgggaggctgaggtgggtggatcgcttgagctcaggagttcgtgaccagcctgggcaacgtgacaaaaccccatctctactaaaaatacagaaattagctgggtgtggcggctcatgcctgtggtcccagctatgtgggatgctgaggcaggaggatggcttcagccagggaggcggaggttacagtgaaccgcgatcacgccactctcctccagcctgggcaacagagcaggatcttgtctcaaaataaataaaggaaagttggtcctggccctccagcatttctccagggtccttttttcagcagggacctggcggaggcatcgccctcagagtcctctggacctggacctgcacacctatgggagcaggaaggacccttgtgacttccagtggcccccctgggtgccaggtcccacagtagccacagcaggagcagagtgggtggggtataaactcctatcacaggagggaggactagccgggcctggctgggtggacctgtgtctacagccacacatttcctgggaatctggaagcctgctacagagaggccaggtcccactagactgaaagaagttcctgttaatccaaaggcctgacctgaggaccacaggataaactgcgtggttattttggtgccaatcaggcacggggactgttgttcctcactgtgtgcctataagcagggggttcctgggggtagacgcaggagcaagagcacgctctggaaaggtgatgttgtcctctgcacctgagtactgacttgtggagaaggaaggtagcgccggcctctgctctgcttgatcagccctgctgaccactgggttctgtttctaccccagaaaatcactggttcaatggcagttttccacctgccacaagggaagccacacgtggcagggctggggagttacagcatacccccccgccccccactgcctcccagagcacgtccccttcctcctggcccctggcacgtgcttcctccacgcacgtcatggctgactctgccctctcaccttcctttcagaacccagggaccatgggcgcctccaggctctataccctggtgctggtcctgcagcctcagcgagttctcctgggcatgaaaaagcgaggcttcggggccggccggtggaatggctttgggggcaaagtgcaagaaggagagaccatcgaggatggggctaggaggtaaggatggggcaggtctggccatagaaccggctttcccagggcacagggattcgggctgtagggccacacccttggtttcaccactaagagctaagtgacctggagcagggggttaagcgtgagcctcagtgtcttcatctcagaatgaagaacagtccgcagcccttcggactcttgtgaagataaaatgaggaaatgaactcgaaggacttagaacggtgcgcggtgtgcggtgcgtgctgagtgcgtgttagctgttgtggtgcggtggtgctgggggctgcagggcgtatctggaagcctctgtgcagcagcttgaattgaaccctcccagcaccctcactgttgccgaagggctcgtcagtcacttggttcctctgtctgttcagtggagctgatgatcgctttcatctcacactcgctgtgcacaaagcctcactgcatcctcaacacagccagcttcacctaggaaggaactgaagcccagagaggttgagccgtttacccaagatcacacagtcctccagacgcccctcaaccctcacagggtaaatgagatcatctgtgtaaacatcgctgcacagacgttagcccccgttcgtgtttttgttctgagaaaggtaggccagcttgcctggagaggagaactacagagtaaagagggtcctggcacggaggaaagccaggacgctgcagcctagtggctttccaattttttcatcacaacctgcagtaagaaatacgttttgtactctgatagagtgtacacactcaggtgtgcaggtacagctaaagtaagttgcagtagccgcccttattacataaaagggggctctacttttccgattcatttctctttttttctccagaggtgggatctcacccatggcacactcttggctcactgcagcctcaaactcttgggctcaaacgatcctcctgcctcagcctcacgaacagctgggaccacaggcacatgccaccacgctcagttcgttttttaattctttgtagagatggtgtctcattaactcccaggctcaagcgatcctccctcccgggcctcccagagtgctgagattgcaggtgtgggccactggcttgacccttttttttttttcaattgcaatccactaagccgatttcccggggtacatgggtcccaaccctcagtttggagagccctgtgtgtgcttcccctccaaggcttgggaccccagaccgcagccacacggacacgttcgatcagtcactgtggcaggtgccagtgcgacaggctctgtgctgggggccgcagctggggaggaggaccactgggtgtgagtcgggcatacagcgtgtccctgccaggagtgtgtgcagagcgaccacagcacaggaaacaggaaaggtggccccgggggttctctgcccagccctttgtctttgatctgctaagactgcccatcagctcatggatttctgtagcgctgctctgtgtggggcctggggacatgaggaggaacaggtcagtccctgcctctgtggagctctcgtgtcatctggctgccgggttcaggagacctgcagaaggaggtctggtccatacctcgtggccaggggcctccaggagaaaggaagggagaataactgggcaccaggaaaatgctctgagggcctgacgttggctgggagagtgtggaaggagggaggaaggagacatttgcagaagcacagagggctggaggagcgccagctgtgcagagaagtggtgggtgtgagtggagcaggcagcggtgctgaggaggctggatggaggaactccaggtggctggatttccgcttctcgtcctgctggtgacaagcaaagcacaggccccctcggcagccctgctttattttcttctgaactttgtcacggtcgaaggaactttcctcctaccctctgtaaatattacacaaacagagggaccatcactccagaccctcaaagctgaatacagtggtggcttgctgtcagaccagggtttgagggggggaactgaggcacagagccggaagcctgtgacttccatcctcgggtgtaacctggagacgggggtttcaccatgttggccaggctggtcttgaacacctgacctcacgggatccacccgcctcggcttcccaaagtgctgtgattacaggcgtgagccaccgtgcccagccgagaccctgtcttaaagaaagaaagaaaaaaatccttcgttggggagcatctgcaagcatgaggaatgggggacactggagccagacaggctggtgcttaggggtcccagggccccgggaacccagcagcaaacagcctcgccctcaggggatgacgtaccatcagccacaggccaccagcacggccctgggcttcagtacctgcgagtctgaatggatttgctcctggggcaaccccaggcccgtgctgctcaggagcgggaggcagggaggagcgtcggcagcccggtctctggggaggctggttcctgctttatccacgcaatacccagtcctattctatcaggaggaccccaagatgggccctaactcccaggccaagagccggtttaggcaccctccccgcttgcctgcagggggcaggcctgagcgcctaaccccagtccagagggctggactcagaccctcctctgtggggcaggggacaggcacgtagggagtactgaattgtgggggtgtgcagatttgggcttcaggcgcacagtgtgagccgacctttctagacagcatccctggtccccaaagactagcgaggccggggacacaggagcagcgatgggaagcaggcccgccggaacctccgactcccacctccccacgccacggacgctgcaccaccctgtgtttttgtttcatgtatttctcaccctgttccccgtgttccgcctggggaaccgagtgccatggacagagcagacacttgggcagaactgaacagcgtcatcttcgcctgcctggcgctccctgcctgggaaatggagcttcagctctgtctcccggcggattcttgatgcttcctacgctgccatgtgctagggaagattaactaaaatcagtcacaatatcccactgggaggtgacgctttttaagacgagcaacagccggccgccaagaggcgggtgaggccccactgagcacttctattgcatctaactggggagccatttatacccaagtagaagcacacgttcactttgtagctcaagcccaactttaattagccatctgtatgaataaatgctgattccaggtccgtttcctctccagtccctgcagtttaagctgaggaggcatcgcttaaatcagaccatttagaccaggcatggtggctcacacctgaaatcccagcactttgggaggccaaagcagaaggatcgcttgagcccaggagttcaggaccagcctgggcaacatagcaagaccctgtctctacagaaaaacacacacacagaaaaattagccgggcatggtaagaggaggagactgaggtgcccagcggctgcagcccgtgcatccccagggtcccagcacagagtgggtgttcagaagtgtctgctgagggactgagcaagaacccgactgagcacagcaagcaaacgctcagaacgggaggtcagcagcaccgctgtgcccaacacgggtttccaccataacccgaagttggaacgttttattcttccataccaaacaggagttgagaaggcggctgggttccttgaggtgtggaatgtcatgcactcctcctttcttgcgtggaaagcccgaggtataaagtgtgtatgatgtttgcttttttttttttttttttttttaagacagggtctagctcggttgcccaggctggagtgcagtggagtaatcccagctcactgcagcctccaactcctgggctcaagcattcctcccatctcagtctcctgaggagctgggactacaggcgagtgccaccatgcccagctaatttctgtcctttttgtagaaacagggttttgccatattgcccaagctggtctcaaactccggagctcaagcaatcaatcctcccaccttggcctccaaaaatgctgggattacaggcatgagccaccctgcacccaacctgtttgcatttttattttttaactttaagctattaagggttaatgtttgcatttcttaagggaaaaacagaggagaaagagccaaaggaaaaacactgaaatggtagcattcctgggtgatgagtttatggcgttttgtttcctggttgtctataacaaatatgtaatttttaaattagcaacagcgttagactacttcggggaaacctggctctgtgtgccacgaagcagggaagggcttgttcccaggcgcagcagcacttgggcatcccgtggtgaagtcagccccttacacctcctccaggcacagctgtggggagcatgtcccgagaaggcgcaggaagaggcccaggccacgtgtcccgtgtggtcagcctggggaccagagttaaaaccagagctcctccttcaggaaacagatcatagaagcctgtggtttcatcctgtgttctcagagaagaggcaccaggctggaaagacatttctttgggcagacaggcccagagtatagggcccaggttcccagagcaagcgtcccagggccccggcggtcgtaactaccgctgcatgggctctgatgctcagccgcggaaaagcaagtaaccgggaatgaaggaagtggggtcagtcccaaccctgccacgtgcgggtctcgagacggtggacaagtggctggactccactgggcctgggctgtcactggtacacagagggcactgggctagaactgcgttcctcccaccagaggctccacaccatctccgggcccctccccagagcctctcaaccaaaatcagtgtcttcaaagttcaagttgattctgaagctcagccaggtcgggaccagataatgcattctaggggacatcctcctgggtctcccatccaccctggtggctccctgggctgtgtgtagatgcccagctcctcctccctgccatcgtgtgggcatggcaccatgccctgacggcctccctcccctgcccacctctgcccgcagggagctgcaggaggagagcggtctgacagtggacgccctgcacaaggtgggccagatcgtgtttgagttcgtgggcgagcctgagctcatggacgtgcatgtcttctgcacagacagcatccaggggacccccgtggagagcgacggtgagtctcacagggcctgctccccctccccactatgcgggtcccatctcctggctgggagaaaggccatccgcccaaaccatctctgagtgccagggaccgggcagcctgcgtccccctccaccccacagtgccagcgtggggcccatgagccgtggtctctgcaccgaggctccagtagcgtacctgcccctgctctgcgcccaccctaaaatgagaaacacggtaatgaggatgaaatataaacgatcgtcaggttcctcacgatcactcagtgaactcctcagagagtcagtgtacgtttgggctggccagacgcagtggctcacccctgtaatcccagcactgtggactgtgggaggccgaggcaggaggatcgttgagcccaggagttcaagaccagtctgggcaacacagtgagaccccatctctacaaaaaaacatggttttgttgttgttgctgttgttgttttgagacgaagtctcgctctgtcgcccaggctggagggcaatggcgcaatctcggctcactgcaagctccacctcccaggttcacaccattctcctgcctcagcctcccaagtagctgggactacaggcgcccgccaccacgcccggctaatttttttgtatttttagtagagacggggtttcaccgtgttagccaggatggtctcgatctcctgacctcgtgatcctcccgcctcggcctcccaaagtgctgggattacaggcgtgagccaccgcgcccggccaaaaaaaacatgttttttaagcatgaagtttgggttgcacctcagtgcctcctcttcccccattggtacagaaatgcgcccatgctggttccagctggatcagatccccttcaaggacatgtggcccgacgacagctactggtttccactcctgcttcagaagaagaaattccacgggtacttcaagttccagggtcaggacaccatcctggactacacactccgcgaggtggacacggtctagcgggagcccagggcagcccctgggcaggagacgtggctgctgaacagccgcaaaccatcttcacctgggggcattgagtggcgcagagccgggtttcatctggaattaactggatggaagggaaaataaagctatctagcggtggttttttttttttttttttggaga

SEQ ID NO: 1381 - DNA, 83 bp, Homo sapiens
aaggtgatgaggggcctctccatctgcaccacctgcctcctgagcatgctccaggccattaccatcagcctcagcacctcctg

SEQ ID NO: 1382 - DNA, 354 bp, Homo sapiens
gttgagtctaagaagtttgtttataacactggagtaacttcctgcttccatgcaggtagctctcagtcactgctgagtaatttaagatggaaaactcagtgagtttactcaagagaaaacatctccatgttagatcaggttgcacaaaaaaaagctttattgactcactggactctaaactccatgttcattgttttgatgaacaggaccacaccccgaggttggcctggagaaggtaaagaaatcggatctagaaagagccaagggaaggcagattggacccaaagttaacacctacgaccaggagactctggagaaaaatgaaagtgctgcctcataaagggtcaacgagaa

SEQ ID NO: 1383 - DNA, 149 bp, Homo sapiens
gatagcattgggagatatacctaatgctaggtgacgagttagtgggtgcagcgcaccagcatggcacatgcatagatatgtaactaacctgcacattgtgcacatgtaccctaaaacttaaagtataataataataaattttaaaaaaa

SEQ ID NO: 1384 - DNA, 83 bp, Homo sapiens; identical to SEQ ID NO: 1381

SEQ ID NO: 1385 - DNA, 636 bp, Homo sapiens
ataactattcttgttttatattttattatagtggaacagctcgtgtcctcggtctcttgcctcggtgcctgggtggcttgccgcccacagctaacacggtgaaaccccgtctctactaaaaatacaaaaaattagacaggcgtggtggcaggcgcctgtagtcccagctacttgggaggccgaggcaggagaatggcatgaacctgggaggcagagcttgcagtgagccaagatcacgtcactgcactccagcctgggagacagagcaagactccgtctcaaaaaaaaaaaaaaagagattcatcatctaatatacactctttatattaaatgctgcaaataacagtttgatactaatggcagttaaaatcattgtgtgcggaaacagaaagttaaccaaaaaagaagagtcaattcctcagatgtgtaaaatactgaactagaagctttagaattacaaagagaaaatagcgtcagagatgagctttgatctcaaggatcagttgggaaacattaaagaggcacctcacagtactatactttccacagtaagcgccaaatgaatgctacagacaatgagtagagcaggaacatcaaaagagattattcatagtcagaaatcagggttttttgttt

SEQ ID NO: 1386 - DNA, 101 bp, Homo sapiens
cctgtaatcccagctacttgggaggctgaggcaggagaattgcttgaatccgggaggcagaggttgcagtgagccaagatcgcgccactgcactccagcct

SEQ ID NO: 1387 - DNA, 461 bp, Homo sapiens
aagccagacacaaaagatcacatattgtatgattccatttatacggaatgtccacaataggcaaattatctgtagagtcagaaggtagattaatggttgcctagcgctgggggaggaggctgagggaaaacaggaagtgactgttcatggatatggagtttctttagggtgatgaaaatgttcaggaattactggtcatgactgcacagctctgtgaatatactaaaaacaactgagttgtaaggtgtgtgaattttatcccaataacgctgtttaaaaaaacagaagcatgggctgggtgcggtggctcccacctgtaatcctggcactttgggaggccaaggtgggcggatcacgaggtcagagatcgagaccatcctggctaacacagtgaaagcccgtctctactaaaaaatacaaaaaattagctgggtgtggtggtgggcacctgtagtcccagc

SEQ ID NO: 1388 - DNA, 101 bp, Homo sapiens
acacctgtaatcccagcactttgggaggccgaggcaggtggatcaccagaggtcaggagtttgagaccagcctggccaacatgatgaaaccccgtctctac

SEQ ID NO: 1389 - DNA, 222 bp, Homo sapiens
gccagagctcacaaatagttggaactgccctaaggatgccattttgttcttaaatataactagcaaatattactcaaagctgtgcacgatccccaaaccctggtccccaataatttgaataatctgaatatgcaagttaaggtattgagatgggaaccctcctgtgtggtatatcttgctcttatcctttgtgaagccaataaacttcaatttctactctca

SEQ ID NO: 1390 - DNA, 374 bp, Homo sapiens
gaaagcttaaatgctgacatgttacaaagtagttttgttgatagctagcaagaagcacacattttctttattctgttgaatcttcatttggatttacagttctgggcagatttggaaacggggatggtggcggcattgtttccgaaaaccagcgcatccgtgcaaagaatttaattccctcaccatcttgctactggtctgttgcagtggggtgtggttagagggctaggaagcaatccaaaacagcagctcaggctgcccaaagccgtgtccaagcgatcattttctccattttgggccaagtcaatttgcaccggcaagaggcagaatgtttgttttatggggaggaggaaaataaaaaaggaagtcagaga

SEQ ID NO: 1391 - DNA, 100 bp, Homo sapiens
ctctactaaaaatacaaaaaattagccaggcatggtggggggcgcctgtaatcccagctactcgggaggctgaggcaggagaatggtgtgaacccaggag

SEQ ID NO: 1392 - DNA, 159 bp, Homo sapiens
ttttttttttttttgatatggaatcttgctctgtcgcccaggctggagtgcagtggcgcgatctcagctcactgcaacctctgcctccagggttcaagtcattctgctgcctcagcctcccgagtagctgggattacaggtatatgccaccacgcccag

SEQ ID NO: 1393 - DNA, 159 bp, Homo sapiens; identical to SEQ ID NO: 1392

SEQ ID NO: 1394 - DNA, 6041 bp, Homo sapiens
gagccattgacactggagaatgatacctaccctgaaataactcacttcctgaggaaaaaacgccatctctagggtacagaaacctgattctgggctccttttgggaaggaggatttggagtctggtgagagcaaatgattttgcaagtataaaacaatgtccagagaggctgtagggatatctgtgagcccagaggaaacaccaggggatcctgtgcgaagcaccatggcttcagctagggtgggaggagtgggtgggcctctctctaatgacttatcctggtgtttgtgtttctaaagatttgattgtggagagcatatctgatgatggggatttgtaggtaggtaactactttccacgtaagatccaattggagagagttcccaggggccttcggggtatccatgctgcttgggaggttaagggagggggcatgaaatcaaaaggaaacaggaaatatgtgtcatattggatttggtcttttccgggtttattggcataatagttagaactgtctctctgggctatgagggtgctgtgatatttaaaggtggtctttcccagaacacctggccttttcttttctgcctctgccaaacatcacagcctttgggttggattagtcagcaccccttgggattgtgcagaagaggtttggggttgcatcgagtgtcacctgtggtgaacagaatctgagggacacaactctctcacaggcacttccttcaacctggagacagagttctcctggtgtgtgcccaggggtggaggagaaattgacagtctgcctctgaactttcaggactttaaaaagcactcatgtttccatcctcactgttgactcctggcttaaagggatctcccggggtgagtgaggaggcgggatcggaccctggcagtctgacggcagcacctgtgttcctctgcactgggccgtggatgacattacacaccttggtgagaatcaggaattgaggctaaccacatctgaaattgagatgggccttgagtcatataaatagtttggaaaagatgcattttactacgctattgaaagaaaccatttatttctcactccagcaggataaatggttttcagtatccatttaactgctcattgactcttactgtagatgaggaggtggccagcagcccctgccctcccccagttggtaggcccaaggtaaccagcaattgactggatataatggaagagtggtgcattcggaagtatctgtattaatgggacccacatgatatggatgagagctattagggtgagaaaaagcctgggagcacaatgaaatatttaaatattaaacaaaacattgttgaaatctccattgtactttagtagttgaagtcattcttgtggtcatcactgcctttcccaagcataacaagctacttaatatcacatggacccgtgccatgaggaatgatgatcagtttgtaaaatgccaataaaacaattgcctatataagccacaatgtttcatccatatatttcaatttccatgtgtaagtatagttcaaatttcagaaatttattattatctaatagaatatgcatggtatatcaatgagcaattatcatactgtttctattaacaattatttgtatgatgaaaaaagcagactcccattcttggatttttctcagtttgcacacattagcatgacagccccatttccacctgacatgtgccagcaagaggccaggaacagaggcttttcttattaactaagatttctaaatgtattacgtattcacatttagaaactctaaatatcataaaaggttagcaaggaagtttcccttccactctgaacttccaaacaccaagtcaacatttttgtttgcatatcatccctgcaatctatgtgcaaatagaagcatgcacctggaatgcaggctgatgtgtgatcgtgtttacacaaagtcctctgcacctctgcatatatcactgggcaatgcaccttagttatcattccacatttcaaatgtaaatccattgtattgtttcagagctataaagtactgcaccccatgactattcccaaaattacttaagcaccccgctatgggtatccgtttgttctgtttccagtcttgctcttataaccaatgctgtagtgaacagcactgtgttgagaagcggtgaacgtgggcatctttgtcttgttcccttcctcagggggaatgctttcaactctcccccattcaggaaaatgttggctgtgggtttgtcatagatagcttttattaccttaaggtatgtccgttctatgctgattttgacgaacggttttaatcataaagaaatgctggattttgtcaaaggctttttctgcatctattcagattatcatgtgatttttgtttttagttttattgatgtgatgtatcacatttattgacttgcgtatgttaaaccatccctgcatccctagtatgaaacccacttgaatcatggtggattatctttttgatatgctgttggattcagttagcttggttgtagcatttcttattattccatctgtggaatgtattggttgaaataatgaaaacatgttctatcctcactgcttagcactttgtgtttctttaatagccttcccaacagggcaacataaaagcaggagccctgctagtctccccttaacccggaatccccccttctccacagctcgctcattggacaggatagactgggcgcccaggcttcaaggtaaggacgtgctctgtcacctagaggtgcagtgcttgggaaggccaaccttggagggttgcctgccagctttacagtgacagaggtgttgagagggactgaccaccagtgcagaaggctgtgctttgttggtgacataaaggattgtttcacagattgttggggagggacaatcccaaggcctcccctggccctggtgctggctctgcacaaaggcaataagagagggatgctggtaagggctgacctgttgctgtgctggggaggaaggtgctgggctgaaattcaggaggctgaggatgcagcagtcccataggaggtacatgaccttcaggatacattttcttcattgatgatcaatggaaatgagaaatcactgactattttttctatcattggaatctactctccactgctcatgctgttcctgtcttttggggaagatggaggatcaatcagtgtgcgctgcactgagtggaaggaaggagaactgtgacaaaaattaaggaaggatgagagacgggagggcccttcatccagctgcttgcagagtcctcctgaggaggaaagccccgtggctccctggcgaaggagcagtgagggctgcgtgactcccacagtgaagtgtgtggtatgtctgaggacacccaggctggtggtccatgaggagccagtggcagagtgagaagaagaaaggccaggagggtggctggaggccaggctctgagtcattctccatgtgatggaaacagccggagcccagtgggcttggaggtacaggatgcggtggctgatgacagaacaatgtggagagaggcgtcatttgtcaaatccttactttgttctgggcattgtgctaaaaattctgatggctcatcccatttaggggctgaaagttgcagaggtttaggaagctcacccacgatactggagcccccatctcctgccctagtgctgtccaccttctcacccagccaccacctgtttcgggggaacacacagaagtggtaacctcttatggagaggcaagtaaattctgctgtttttgttattcacagaaaaacactggctcgtgtgggttgggaaggtgaaataccagaagtatttcatctggttatttctacccatgcaactcctataatattgaaatgcataggttagcatttttggccaatttactcagcattctgggttaaaggcttttatttattttatttatttatttatttatttttgagatggagtttcactcttgttgcccaagctggagtgcaatggtgcgatcctggttcattgcaacctccgcctcccaggttcaaactattctcctgtctcagcctcccaagtagctgagattataggcacatgccaccacactgggctaatttttttgtatttttagtagaaatgagatttcaccatgttggtcaggctggtttcgaactcctgacctcaggtgatctgccctcctcggcctcttaaagtgctgggattacaggtgtgagccaccacgcctgccctaaagtcttttaaaattcacttgtataagttgacttagttttctttaaccttgtagaaaaatacaaaaatggcaatctcttttatcacacaaataatgtctttttaatggagtgatttttttctaattgaggtattatgtacttttcttttactaattattgtttacatttgaagtgttttatgaatgaatatttaattgcatagatgaagattactagttataggcattttactaaccaatactcattaagcatagcgtggattcatatgacatcaaggagctattttatttggtaaaatgaaaaagcacaagaatgaacgaacgcaagaactgaaacagtggagacacctagaatgacttgtctaagatctaaatcattttgttgtcttcccagcgtacttattatcctgatcattgtcatcagcattgtttgggtccttttagcacagatttctcaaaatgggtaactccataacagttggaagcttacgaattcatataatttgtaagaggtcaatttggaagtacctatctatattaaaattccaataacctgggaatttcatcccatgtcaagagtcttttatgtaaaatatttccacaattaggagaaatatgtgcatggggattttctatgtagcggtgttttgatagaacagaaaattgggataaaccaaatttccatcacgaaggaaatagtaatatgctgaataataatacagcgaatattatgcaggctttaaacatcaaaaaagagttcaacttctgacttccgatgatggtgttgaagcaggtcactgctggtttacatttgattttcatgtgggaactctggaagtccgtccgccttagtgatttcacatgtggctaaattgagctaatgacaagctgttcgaagtatggcaaaatggaactttaaaacagtatcttgtcaacaaccaagaggacctttttcacataaagcccacgcattcatctgcctgtccatcattctgtctgtccacacgggcatcattcgttagtggaactgagtgcccactgtcgagctgacaagcccataacctccctgttcctagtcacacattaattcttcaacaagtcccttttgatagattgtgattaagcttagctactatttccaattgcttccccaaacgtacttctcactgttctcccatcacacccttcagcccatccatgcggggttcctttgcttttcccaccttacaccaaactccctatttttactcccactttgacctcctctccaagacaaaacaaacaaaattagcattttaaaacttagttgtaatctttcttccttcatgaaaatttctccaacagccactcccacggtcctgtgtgttccggatattttaaaataatggctataaggttgagcacttcaggatacgctgttttgctgtgtgcagatggaggcagtggctggagtgaatgaacggcaacacttgctggcaaccggcagaagctgagagacagggaacaggctctcctccagagcctccaggagccaggcctttggacaccttgaatgtgggcttctgggagaccatgcgtttctgttataagcagcccagtctctggcagtttttacggctgccccggaacactcatctatacctgtctgacaaggtcaagctccaaggaagggactctctacatatctacattgtttgcagattttacaataatcatttattcttgcatggctgatcattgttaaccaatacaaataaaataataaagaaatgacccacatttta

SEQ ID NO: 1395 - DNA, 656 bp, Homo sapiens
ttccatttatgcagccaacagacacgtgaaaaaatgctcatcatcactggccatcagagaaatgcaaatcaaaaccactatgagataccatctgacacctgttagaatggcaatcattcaaaagtcaggaaacaacaggtgctggagaggatgtggagaaataggaacacttttatactgttggtgggagtgtaaactagttcaaccattgtggaagacagtatggcgattcctcaaggatctagaactagaaataccatttgaaccagccatcctattactgggtatatacccaaaggatcataaatcatgctactgtaaagacacacacacatgtatgtttattgcagcactattcacaatagcaaagacttggaatcaacccaaatgtccatcagtgatagactggattaagaaaatgtggcacatatacaccatggaatactatgcagccataaaaaaggatgagttcatgtcctttgtagaaacatggatggagctggaaaccatcattctgagcaaactatcacaaggacagaaaaccaaacaccgcatgttctcactcataggtgggaattgaacaatgagaacacttggacacagggtggggaacatcacacactggggcctgtcctggggtcggggaaggggggagg

SEQ ID NO: 1396 - DNA, 413 bp, Homo sapiens
tagggaggtagcaccgcatggaagctgaaaacagtgacagagaaaactacccagaccaggcgttgtccttgatcccttcaggaacatcactgggcaatgtgaggcacagagagagctagaaagtgtttgggggctgatttgtttttcctgagacgaggtctcgctctgtgacccacgccgaagtgcagtggagccaacatggctcactgcaacctcgaccgcctgggcccaagcgatcctccttcctcaacctcctaaagtgctgggattacaggcatgagccactgcagccagcttggtggctgatttttaaaaatttattggctagttgatggatttgtctgtatatgctatatgttctctatattatctgtcacacttccaaagtataccagctcattctctcccttcac

SEQ ID NO: 1397 - DNA, 1829 bp, Homo sapiens
taacatttcgacctgttaaataaaatgggaagccacacttcataccaataaaagtagatactgaataaattaaaagtttgatgagaaacaggatatttacacagtttcaaagtactctcccacaaaatacatattattaattaccattattacatacatgtgatacaggttcattctgcccgcatgccataaatccatcactgtgacaggttttgtaaaagagaaaagatttattcgcaaggcagcccagtgaggaggcaggagaacagctctcaaatcttcctccccaaagataagtcttagggatatttaccggtgagagaagcagggtggtgtaaggtatgggcaaaggtgattggcagtgggggaaaatgaggcagtcggtgaccactgcaagcatagtcagggttcgtggcacttcacagggcacatgttcaaaaaatgacagccttagcgtgatctgagggtgtcgcttggggcctctgatgtcaaaaggccacttcttttgtttgcacaagcctacttgaaagctcacggtctcaactggtttgaactaggcaggagctgccccaagttcctgaaaaacaatttgaacgatcatgacagtagtgacatacatgttatctgtaaggaagccggcaaggttaagttacagcgctcagtggcgcggccttcagcttcacagaaaaaaaataacaaaagcaagtgacccaaagcaagcagggcaggctaaattgggcagacctaatcagatgaaccccatggtctcatatgtaatattacattataactataaagaatgtaattaatgtaaatattcggtacaagaaagtcatcagtgcggggaacactggaattgcgtgccaccagaggacagagtggagccagcgcggtatcacttctgtgctgttcccatcgaaggtcagtaaccggaaccccttcgccaggacgcgggtcctggccaacccaaatcgaggggcattctgcagatcagctggtctgccatcttcaaacgattcatgaaaatcaaagacagctttgaggaacggctccagactggcagagaccaaagaggtcatagatgaacaggagatccccaactggatcctttggctgtaaaggacaatattggcacaacgggtgaagcttgaatggggtctgaggattaggtggtagtaacttcacaggcggggatttgggagaaatgcaatgtcacgtggaaaactgactctcaaatagttcaagaaggaagttctttggactatacttgcaacttttctgtaggcttaatactgtttcacaattttaaaatgtaaaataatagtaccaggtagtagttttttattaagacagattgtgctttttgaaagcattggtggaaagatttctcaaaatcatgcgcgaaagagtttataatgaaattgtgtaatatttgtttcaaaagaaagtgtgggccctgagaagcattttctgtagtttacacagtatttctgccaatttgggatactttcagtgtccctggaattctcatcatctgaatttcttactctttttccctttaaaaaaaaataaaataaagaagtatgaggcaaaaggccacacctacctacctcactttaaaattctgtctaaaaacctggtcacagaggaagatgttggctaactttaatgcgataatctagttcccctcaaaatggaaagctatttagaaaaaagctatttgcccaacgtgaggaacaatttatagaaactgacaagaatttttgtcctggggaaaggacagggtttgttgcatgggataaggggaagtgatgtggccgggcatgatg

SEQ ID NO: 1398 - DNA, 300 bp, Homo sapiens
ttgttggggtttatgttactgaagaatgaacagagatgagtaagtggaggtgttatgtaaaggcatactgtactcaaaatctgaagacctgcagcagatttaaattccagctcttattataactttttaaaagattgtgaaaatatcaaaatatagatgaatcaagttttaatatactgtatgatgggtggatgaggctgtccattgtaccatttgtttgaattctcaggcatggtttggcagtgcaagaactctgtaacgttaacaaattcaataaaaagtaaatatatggaaaaaaaa

SEQ ID NO: 1399 - DNA, 168 bp, Homo sapiens
tatatatatatatatatttattatactttaagttctagagtacatgtgcacaatgtgcaggtttgttacatatgtatacatgtgccatgttggtgtgctgcacccattaactcgtcatttacattaggtacatctcctaaagctatccctccccctccccacacccca

SEQ ID NO: 1400 - DNA, 83 bp, Homo sapiens
aaggtgatgaggggcctctccatctgcaccacctgcctcctgagcatgttccaggccattaccatcagccccagcacctcctg

SEQ ID NO: 1401 - DNA, 83 bp, Homo sapiens; identical to SEQ ID NO: 1400

SEQ ID NO: 1402 - DNA, 279 bp, Homo sapiens
caaatcacatgtgaggcatccaagaaatccctttgaattaggtttgatcaaagtggaaggcattatttaaagcagagcctgccccgcaagagtggttaacctgaatggtttagacaggaggttgacaaactttatctgtaaaacaccagagtaaacactttaggttttatctgccatagtcccaactactcaactttgtccttgtaatcaaaagcagccacagagagtttgcaaatgagtgggtgtggccatattccaatacaattttatttacaaaaa

SEQ ID NO: 1403 - DNA, 471 bp, Homo sapiens
ctacaaaacccatagtctttgcactacaacacaagcaaagacgagtcctctgccaacccacatggcagcttggtgcaaattggaaatggggccttttctgcccagggacctcagggcacagagcctggcaactcagtcaatggccagtttctgccctcgactaacccccttggctgggcccctcatgaaaggccttgcaccactgcacaccctcgccctgttcacagaggtagcaaagcacctgcacgtagtcactggtgtgtttccaggttcccctggcatgagacacacacctatgaaatggcaactgtgatcagaggcatagcgagggtcctggagcagagtaaatctaaacatcttcaaaggagctgagccatgatgttggtctcactgagaaaagtggaaggaggaacatttagttttatcctgtggggctgatacccaaaacctgtcatgtacagactattccgt

SEQ ID NO: 1404 - DNA, 232 bp, Homo sapiens
cgggtgtggtggctcacacctgtaatcccaacactttgggaggccgaggcgggcggatcacgaggtcaggagattgagaccgtcctggctaacacggtgaaaccccgtctctaataaaaaatacaaaaaattagccgggcatggtggtgggtgcctgtagtcccagctactcgggaggctgaggcaggagaatggcatgaacccgggaggcggagcttgcagtgagcagaga

SEQ ID NO: 1405 - DNA, 6150 bp, Homo sapiens
aaagtagagaaaacagtgtaatgaaccactacatattcatcaccctgcttcaaaaatactcaacatttaggcctggtgcggtggctcaagcctgtaatcccagcactttgagaggccgaggcaggcggatcacctgaggtcaagagtttgagacaagcctggccaacatggtgaaaccccatctctactaaaaatacaaaaactagccaggcgtggtggccggcacctgtaatcccagctacttgggaggctgaggcaggagaattgcttgaacccaggaggcggaggttgcagcgagccgagatcctgccattgcactccagcctgggtgacaagagcaagactctgtctcaaacattttgtcagcctttttcatctatctgccccctcctctttttttgcactagagctgggattggcaaactgtaaccccatagaccacatccaacctgctgcctgtgttttaaaaattgagatataattaatataacacatcataaaactcactctcttaaaatatacaattcagtggtttttagcattttacaacattgtgcaaccatcaccattatctaattccagggcattatcatcaccccagaagaaaccccacacccattagcagtcactcattctccccttccaccagccccgggcaaccactaatcaactttgtctctctggctttatctactctggatatttcatgtaaatggaattatacaatatgtggcttttggtgtctggcttctttcacttagcttaatgttttcaaggttcatctatgttgtagaatgcaccagtactttgttccttttcatggttgaccatttcacattttgtttgttcattcatcagttggacagttgggttgtttccacatacattttcaattctactgggtatgcacctaggagtggaattgctaggtcatatggtgactattgtttagctttttgaggaactgccaaactatttcccaaagtggccacaccactttacatttccatcagcaatgtataagggttccggtttctccaaattcttgtcaatatttgttattgtttatctttttgattctatccatcttagtggatgtgaaatggcatctcattgtgtttatttgcatttccctaatgactaaagaggctgagcatcttttcatgtgcttattggtcatatgtataccttctttggagaaatgcctattcaaatcttttgtccagttttcaattgggttattattatttttgaggcagagtctcgctctgttgcccatgctggagtgcagtggtgggttcttggctcactgcaacctccacctcctgggttcaagtgattctcgtgtgtagtctccagagtagctgggattacaggtgtaccccagcaagcccagctaatttttgtattttaagtagatacagggtttcgccatgttggcctggctggtcttgaactctacccaggcctcccaaagtgctgggattaccggtgtgagctaccgtgcctagcctatttttttcaactattaagttgtaagaattctttatatgttctggatactagactcttttcagataagtgatatgcaaatatttccttccatcctatgggctgtgttttcactttctatcttgaaatagtcctttaaagcacaaagtttcaaattttaattattttttctttcattgcttgtgctttaggtggcatatctaagaaaccattgcctaatccaagatcatgaagatttacatgtgttttcttatgagttttatattttagctcttacaattagttcttatgcatctgaatttttaaaaaacttatgtacttctaaggtacaactaattttagaaagtaagagtgagtagattttgatggcctccaagagtttagaaaaaggtatgagctttgatgcacaattttacccaacatatatatgttggatgattggaactttttttggtctactttagggttttttgctcttttgcagcagacagctgggttgtccagagagctgattctggaaaggtgtatattactatttaggtaaatggtcagcttctagtatcagcaaaataaaatactccaaacatgtttaggaggagccccttacagtcccaagtttaaaaacacagactgttattttaagacattttctatgtatagagccccacagttctaacacaggtatttggaaatgtagagaaaaggaagcaaaaatcagcagctgggacttagtttccaaccaagggaggatggcatggatggctgcacttctttcatttgcagacataaccacaaaccatcagttgctggttgacagtttgttctggagatgtgaggccagtggttcttaaacttgagcgagcattagaatcacctggagagtttataaaaacccagattcctgacccccatctgcagagattctgctacaggaggctggggtggggccattaatttgcatttctaataggcttccagatgctgctggccctaagaccacactctgagtagcactactttagatacatgggccaaccatctcgccctggtgcttaccaaacattgaccaagcaaacatgaagctaggtgactctccttggggatgaatatgataataatctactgagaaattcaagaggctgtaagtatcccaatttcattaaaatttctaaccattggtgatgtcatttcaggttccaggcttatgctctttttcttcttcttttttcttttttttttaatttttttatttttgagacagttttgctctgtcacctaggctggagtgcagtggggcaatatgagctcactgcttcctctgcctcccgggttcaaatgattatcctgcctcagcctcccagatagctgggattacgggcacatgccaccacacctggctaacttttgtatttttagtagagacagagtttcgccatgttagccaggctggtctcgaactcctgacctcagatgatacacccacctcagcctcccaacgtgctgggattacaggtgtgagccactgcgcccagctggcttatgctctttttctaaaaatttgtccacttaggaaagtgtcttgatttcaataaaattagcatggattaaattactttttttcttttttttttttcttttggtatttgatcttgctcgatgaatgtggacatcagctatgggttaggaatgctattcaggaacatctaatgtgtttgtgataatgtatttgacttgtggccaaatggtactcttgagagatgtggttgtgactttgacagattaagccaaagttaaattctgatgaagtgcaaaggaattttatcggtcccaggatggttgccaactgtgttgggcaaaagagtgattttccaaaaaggtccagagcaatccgcatgtattctgtcacctctacttccagtttcttcaaaggccagccaaaagcttcattttcctacttcctgtcatttccaaaaccacagcttaaacctgaaaaacaaatgggaagctgtgttcctgcctcttatgattgctgccacttacaaaccagcaagaacagagcacagcaagcagaggagagttcagtcttgctgatgtcacatgaagcagaatgaggactctgcttgtttggctcctgagtttaaaagataagtagacaatttattgttggtaggttgagaaaattcaagaacagagagaaatctgacagtctggccataagaagaaatttttgcatttatgttcttatagccatacctgaagtcaactaattacgtttggagagaagtagaatgcttgctttaagaagaaaaaacaggctagggcgcggtggcacacacctgtaatcccagcactttgggaggccgaggcgggcagatcatgaggtcaggagatcaagaccatcctggctagcatggtgaaaccctgtctctactaaaaatacaaaaaattagccgggcgtggtggtgggcacctgtggtcccagctgctcgggtggctgaggcaggaaaatggcatgaacccgggaggcagaggttgcagtgagccgaggtcgcgccactgcactccagcctgggtgacagagcgagactctgtctcaaaaaaaaaaaaaaaaaaagaaaagaaaaaacaaatgttctatgttgaccctatccccaacacccttgcagcaggtctattgtaccttaagctgtgctctaacttcattagcaggctctaggcctctctcccagagatcacccatgggagggatccagcttccttcactcagcagctcttacactgctcccaggaggaaggaagcattttgttttaaagagactgcaacacaacccaaaggaaagacagttatcttagtgtccatatgtccacaagaggaaaatgtgggtgtagcattttaatcccagtaagtgacaattagtcactaggcttctaagaagtttgacactgttattcctctcccccttttctaaattgcaagggtaatactgcatttgcacagaaaccatgctaactggctagctacttcattaaattaccatatgattcttattttatgggtacaaaacagttgatctcagtgaaccggcaacttagaaacttaggaggcaaattagagcaattactaataaattatacatgtggtaactaacaatttgtctatcacctagaaatatgagaaaaaactgccagactccctggctctgcaattctgaacaagtcttttcatttttttcttttccaagaccaaaagctgtcattatccacaccagttataccattactcttgctgctttcacagagtccaacatttataatacaaagttaggagtacaacgagtgggatttgcattctgtttggaacagagtgtttgactgcttaaaattaaagaactaaaaaaaaaaaaaaaaaaaaattcccagaacctcaaatcaccccctaaaaaccaggaagtgagattcatgttagctttccctaagtaagtttatggaagagataatggcaagaggtaggggcaaagtatctgttcattcataatcactactgtgcttcgtttctgggcaaggtagtctgatgaaattaaaggaagttctgtgttacaagtcatgtgcttttatgggggaggaggtgagatgaggtcaattaacaagatatgatctttctcttctctccctgcttgtctcacccaggcctcgggtgtgccattcaacatgaaaggtgttgatgccattcattaattgagggtcagattcctctatcagcatattcctcccatctgagactgccttacctccatccacttccacccccaacaggtttcattttctgcagctgctgtcaagagctacgtggaggaagagagtggttttaacaactgcatgctcaaatttattctcactggcctcttgtttgaaggaagtccaatgtctagaccctggatgttgaaacaggatgtaaaaaaaacaccaaaaaaaccctgtatatttgagagagttttgaaacccatcccaaatacactccagcaatggagaaaaatttgattttggcataatttatataccacatttctccccgtacccaacaaaagtgtatgctaatgtctctatatcacatgatatatcagtttaaaatattctttctctttgcctttgttcgtagtctcatttccacttttacttaaaattttaatatcttctccccaggttctttatttatttttgctatatgcctgaatataagacctaattccatgtcaccaatatctcccttgagaagcactgatgttaagtagaataaaatgtaatcaacactcattgtttcctaccaggacaacagtagggtttaaaacaaaaccaacctcgttatgaattccaaacgcccttctaaataactctgggtgccatttcacaacctgacctgcatagttcctttaggctgctgtgggagttgtgactatcctgtgtccacgtttgcatgctaggttgcactaacccagtaaacacattctgtatcagcctgcagtttgtggaggtccgagcacaacgcatggaattccacctctctggggttcctgccaggtggagcaatccagaagtatagcttccacctgtaggggaggcgcctgcaaacctggcagctct

SEQ ID NO: 1406 - DNA, 114 bp, Homo sapiens
ttttttgtatttttagtagagatggggtttcaccgtgtcagccaggatggtctcgatctcctgacttcatgatctgcccgccttggcctcccaaagtgctgggattacaggcgt

SEQ ID NO: 1407 - DNA, 327 bp, Homo sapiens
tttgcagtagtgtgtcttattttcagtctatatgaaaacctacaacagtaacttaaatattgtagaacatgtattaaggtattaaggtttttcccagctgacttaataagttaatttgaattaatggtgtatgattttgaatacaagttcgaagaccttgggtgctgtgtgtgatgtcattgagctggctgtgaaagatgtgagacaatgagtgtcttcttgtatcgcatggtaagaccataaccgtattgtaacactccaccacgggcctcctctcaggggaaagggggattacttcaggttgggccaccgctctgacgtgcacgt

SEQ ID NO: 1408 - DNA, 413 bp, Homo sapiens; identical to SEQ ID NO: 1396

SEQ ID NO: 1409 - DNA, 232 bp, Homo sapiens
tttttattttattttatttttttgagacagagtctcgctctgtcacccaggctggagtgcagtggcaccatctcggctcactgcaacctccacctcctgggttcaatcgattcccctgcctcagcctcccgagtagctgggattacaggggcctgccaccacacctggctaatttttgcatttttagtagagatggggtttcaccatgttggccaggctggtctcgaactcc

SEQ ID NO: 1410 - DNA, 327 bp, Homo sapiens
tttgcagtagtgtgtcttattttcagtctatatgaaaacctacaacagtaacttaaatattgtagaacatgtattaagatattaaggtttttcccagctgacttaataagttaatttgaattaatggtgtatgattttgaatacaagttcgaagaccttgggtgctgtgtgtgatgtcattgagctggctgtgaaagatgtgagacaatgagtgtcttcttgtatcgcatggtaagaccataaccgtattgtaacactccaccacgggcctcctctcaggggaaagggggattacttcaggttgggccaccgctctgacgtgcacgt

SEQ ID NO: 1411 - DNA, 84 bp, Homo sapiens
ggtggccggtgcttgtaatcccagctacttgggaggctgaggcaggagaatcgcttgaacccgggaggcggaggttgcagtgag

SEQ ID NO: 1412 - DNA, 510 bp, Homo sapiens
cccacctggttctgtttgctagcgtttactcttatttcaagtgtctttttgggatttttcaaccttggacgtttccatgtcctgcactgtgaagagaccctatagcagctttcctagcaattgtcagcacaccaactgcacccttcccctggaggaaacaggccaccttgccaggctcctgaggccccattcccaagaaggcaggtcaggttaaactagcagcgaccctaggcccttttctctgggtgccagaggtcattttcttttgagctgagggataatcaggctaaccaaaacagtccaggttaagccctgcccaatccaactggcaaaggtgctgggagtaaagagaaacaccctggaatttgagcaaagtcagatctaaggggccatgggaggctgacagcttggtttttggtcctgggaagtacagcagcctggctgggcccagtggggaggagctcctggccagcagccaggaccagcactgggaggctgggcgccaccctg

SEQ ID NO: 1413 - DNA, 5131 bp, Homo sapiens
atgaagaactgtgaaccatttgtatccttccctctgttggccattgacaagagaaattctttgttgtgtttaacagcgaaactctcgtctatagagaagtaaagttttcagttacattatagatataacctccaaaaaaatttcatcttcacttctattcatatctgatgtattatttagtgccacacacaacttacttagataataaagttaggttatgaaagaagagaatcaaatatgaatcaatttcccctctcatctttttttttgagatggagtctcgctctgttgcccaggctggagtgcagtggcccaatctcggctcactgttaagctccacctcctgggttcacgccattctcctgcctcagcctcctgagtagctgggactacaggcgcccatcaccacgcccagctaatttttgtatttttagtagagacggcatttcaccgtgttagccaggatggtctcaatttcctgacatcgtgatccgcccgcctcggcctcccaaagtgctgggattacaggcatgagccaccgtgcccagcctcccctctcatctttttaagattcaaatattattaattttctattatttgcttataaaacccaaatattatctcaatccccttcctttccatttatatttgtccttcacaatttttggaaaagataacaccactttatttaaataaaaaaatgaaactatctttaaaaagcaagaaacagctgagcacagtagtgtggctgtagtcctagctactcagcaggttgaagcaggaggatcactggagctcaggagcttgaacctaaagtgcactatgatcacacccatgaaaagccactgcattccagcccgggcaacacagtgagatcccatctcttaaaaaaaagagtgagacagtccagattagattcttttacatttcatctgtttcatttctgagcacacagagtattatttagtctggactcattaacttaacctctgccatagcatcacttaccgcaaaaggaggaatttgttttccaatcttgggttagaatattaagaacaaatcatgtagaatgggaaacaaaatgctactaaatgttaaaagtgaaggatgaaaaatattaaattatttccacattaaatatgcttatagaccattttccaaatggtcttcacatcaacaaaaaaattccagcaagaaaacttaaatttttggaaaatattatagtcaaattttagaatatcaaagattttttaaaaatgttcatagaaaaaatgacctaaaatttggatgttgtaagaaatattgctgaatctcctttaataaaagttaagattgacctacggaagttcctattctatcattaaaattctaagaattaagtacagatcattgaaaccctttcaaatcatgttgtaaaaatgtcctaagaagaaaaaatacccatctgtataaaaagcaattttttttaccagaaaattaaccttcagattagttgaaggcagctagacattagtataccctttaatgaataatgttattgattccatagagaataaaatagaataaaagacaaaatatttaaaacataatataaatgtaaacatttttaccttcaaaaaatcctccatagatagattcccctcctcgtccatttcctaaaaatgaaaaacatactcttataactctcagtaagctcctcaaaggtgatacctaaacacaatacttcttgtaaagtagatttttgaataattttgaattaacaatattcgaagattgcagcaaatcataaaagatattaatgtcaataacgacaaggtcccaaattactttctttcccctatgctatgatagcaagaatgtgacgaagactattaaaatatattttaaaaaagaactttcagattctaattatgattatgcaggtcttgcaacaggttaacattttttcaaagttttttaaaactatagttttgatatttttacaataaaaaagtaaaaatttttattgtagtaaggattaccacttgtgacaaaatcaaacagaaacacttgacagattactgagatgaatgcagtgttgttttgtatccagaagcctatttctgaaattcatgtgtcaaaggcaaaattattttctatgagcttccttcttttttttttttttttttttttttttgagacagagtcttgctctgtcattcaggccggagtgcagtggcacaatctcagctcaccgcaacttccacctttcgggttcaagccattctcctgcctcagcctctcaagtagctgggactacagccacgtgccatcatgcccagcaaatttttctatttttagtagaggcagggtttcaccatgttggccaggctggtctcgaactactgacctcgtgatccgcccacctcggcctcccaaagtgctgggattacaggcgtgagccaccgcacccagcctatgagcttccttcttttacatatttctatgagtacttctaattgaccaaagattaaatggagtgagagtgacaagaatattggactaaaacttctagggacttgtctaactttgagatctgtgatatttaacagaaaataatacatgatttttccaagtctcaccttcactgaagtcaccaccttgaaccataaaatccttgacaactctgtgaaagagacaactcttataatgtaatggtttctgagttgatttcccggtccccttttcacctatagagataaaaaaataggacatttaatagaaaggaaatcaaagtagtatgaaagcaaaataaatgtaaaatatgcccctcttgaaccctgcagacttaaaatcatattttcattcctttcaggaatttttttttaaaaattcatttaaaaaatcacccacgttatttctggagaatgtagaaatcactctcaaataatatacctttacaactaatgtttggttttaggtttttttttgagacagagtctagctctgtcacccaggctacagtgcggtggcacgatcttggctcactgcaacctccgcctcctgggttcaagtgattctcctgcctcagcctcctgagtggctgggattacaggcacctgtcaccacacccggctaatttttttttttagtagagactgaatttcaccatgttggccaggctggtctcaaaattcctgacctcaagtgatccacccacctcggcctcccaaactgctgggattacaggcatgggccaccacacttggcctctatttttttaattgagacaggatctcactcttgtcgcccaggctggagtgcagtggagtgatcttggctcactgccacctccgcctcctgggctcaagcgaatctcccgcctcatcctccagagtagctgggactacaggcacacaccaccatacccagctgattttttgttatttatttttttgagacagagtttcactcttgttgcccaggctggagagcaatggtgcgatcttggctcactgcaacctccatctagggttcaagtgattctcctgtctgagcctcccgagtagctgggattacaggcacccactaccacgcctggctaatttttattttttcagtagagatgaggtttcactatgtttgccaggctggtctcaagctcctgacatcaggtgatctgcctgccttggccttccaaagtgctggggttacaggcgtgagccaccacgcctggccgattatttgcatttttagtagagatggggtttcaccatgttggacaggattgtcttgaactactgacctcaagtgatccacccacctcggccccccaaagtgctgggattacaggtgtgagccaccatgcccagccacaccgtgcccagccataatatttctttctttttttttttttagatggagtctcgctcttctagctcaggctggagtgcaatggcacgatctcggctcaccgcaacctctgcctctcgggttcaagtgattctccttcctcagcctcccaaatagctgggactacaggcgtgcgccaccacatttggctaatttttgtatttttagtagagatggggtttcaccatcttggccaggctcgtctggaactcctgacctcgtgagccacccccctcggcctcccagagtgctgggattacagacatgagccactgcgcctggctgcccagccataatatttctaagaattactttcacgccctagtcactgctgtgtaatcttcatgttaagagaaaagtaatatgcatggagaaatctaaaatagagtaaataaaaaattaaagcaagctatgccaggtgtggtagctcacacctgtatcccagctgaggacgcttatgtgtaaggattgatgagcccaggagttctagtccagttggacaacgttgcaagatcctgtctcaaaaaaaaaaaaaaaaaaaaaaaaacccaggcaagcaagcaagccagccatagtcaactgagactactattagggcagttgaaaatgtgaacaaacctgtacaaagacaacgaaagttctcgcatgttttggggcacacatcagaaaataattcaaagacaactcttccagctgaaaaagaaggtagttggttaaacttctttactaatttaaaatattaaacacccatttataaatgtcaactaatattcttaccaggttgattgttaatggcaatgtcaaaaaaacatcgaggacgttgaacctttattcccatggctccaatacttaatctgtgagtaaaatacagtttcagacaagcagactaaaatagcaaagatctttcacaaatttctggaaaaaaaattctgtgaaacaatattagaaatatagtttgaatttattttgatatttatttctatgaggtaaatcacatggattattagtgctttctttttagagattagattgcattttgtgaagcaattagaaaagacttgaaagttaagccttaaccattattatgtaatcaactttctatttatcaaccggaatacagattaatagctcaaacagaaaattgtatttactctgtatgattagtgaactcaataagcagattaccttcaaatgaagaaaagaccaaaaaaaaacaaggacaactgatccctgtgctcct

SEQ ID NO: 1414 - DNA, 554 bp, Homo sapiens
aataagaatgatctctataaactgttatggagtattttaaggatatactgttaagtgaagagtgaaacagtatacatggtatgccatctacggtgtaagaaagggaaagtgagaaaatgtatacatgtatttgcttatgtttacaaacagaaatacaggaagataaactggaaattaggttggttattaacatgtatagatggaactggggtgaaaaaaaaaaggaaatgggaatggagtggaagggttgggtgggagagacacttcacagtattctttttgttttgactttggaaatgttactatttcataaacttaaaaaaatgcaaaaaaaaaatatcaaaactaggtaggaaggagaacaaaatgaaatataaccagaaaggaataaacctaacacattttgagtgaatcacaaagccaaaccaaaaaagaactaatttaagtcacttttaaacttggtgtttaactacctacactcagtctaaaaacgaaaataaggataaagaaatagtgaactctagttagttggtctttctttacagcagtatggg

SEQ ID NO: 1415 - DNA, 456 bp, Homo sapiens
taaagaggcagaataaacatttggtgccacatgacccctcagaagcatttgccagcttcagtgctaggactgaaaacctgaacaaaaagctgaggttgagcagctaagcagagttttcaatagatgtcagaggcgggggtcacaaaaacgggagttcagggatgacagaccctggtaaacatcccaggcttttggttggaaccacccttcttaccccctaaaaaccccaactttttaccctaggtgtatggtgaacctaaaaattttcctgaaatccagccctcacaaaacacaaaaacttagttttgaattggctgaaatagattaaagtgattcacccttgctcttaaatgcttgtcagaagcaaaactaaatcctctctagaggaaggtaacattcacagcctcagcctatctccacagttttgtgcatgcaagattaacattcagtcaaaaa

SEQ ID NO: 1416 - DNA, 157 bp, Homo sapiens
ttttttttttttttttttttgaggcagagtctcgctctgtcgtgcaggctggagtgcagtggcgcaatctcggctcactgcaagctctgcctcccaggttcataccattcttctgcctcagcctcctgggtagctgggactacaggcgcccgccacc

SEQ ID NO: 1417 - DNA, 5158 bp, Homo sapiens
ttagagagagggtctcactatgttgccatggctggtcttgaactcctgggctcaagcaatcctcccgcctcagcctcctgagttgctgagattataggcatgagccactgcacccatggtgcctaatttctgcctgatatgctgttggctcttggatccctggccaggacaggacatggaacatgggtaagggccacagacccagcagggctgctctcgaacccagtcttgcttttgcagaaagagccccctgagaaggcctgcatgaggcaactgagtgaaacagaggcaaagcaaggaagagagaagaggtcaagccttaccaagggcacagagccaactgcccagagcaagtgaagtcagagagatgggaatccccaggccaggagccaagtttcctctaggagggacaagggagctattgccaggccatgaaggttgatcagaagcttcaggcaaggattattatttattttattattatttttgtctgtagggggcaggtatggaagctgaggccacatttccatgagtcctacttcccacctgagtctgagggccccctgctggtagaacaagttggtccataggggaaacccctcggggcctgtccttccccaaggctggggcgcttcttggggagctgactgtagggctggtgctgagctccccacctcccacaggggttgtcttcgctttctccacgggtaggtctgcctagacaggcctggctggcagcgctcccggctggggaaatggtatctctttgtatctgagggcctggggcaggctgacagcccaagggattgggtgtcagcagcatgggctgccttgcccagcctgagatgctcaggcctgcaggtaccttggggcagaaagccaggcttctcatcctggattggagacaggtttcgactcctggcgcagaatcagaaaagaccccagcctcacaggctagaacaaaaatccagccccagtttgcctggggatgacagcagtgacccctaaggtgggcagcactttgctgtcagttcttcacaacgtttgttgtttgttgtcttttgtttttgttcttgtttttttttttgaaacggagcctccctctgtcacccaggctggagtgtagcagcgcgatcttggctcactgcaacctctgctttccaggttcaagtgattctcctgccttaacctcccaagtagctgggattacgggcacccaccaccatgcccagctaatttttatattttttgtagagacggagtttcaccatgttggccaggatggtctcgaactcctgacctcaagtgatccacccgtatcaatctcccaaagtgatcggattacaggtataagcctctgcgtccggccaacaacgtttgtttttttgttttgtttttcagacagggtattactctgtcactgaggctggagtgcagtggcacaatcacggctcactacagcctcagcctcccaaggctcatatgatcctctcacctcagcctcctgagtagctgggactacaggcatgggccaccatgcccggctaatttttgtattttttgcaaagatgcagccttgtttatgctgcccaggctagtctcgaactcctggcctcaagagattgacctgcctcagcctcccgaagtgctgggattacaggtgtgagccactgcacccagcccatgtttccttaaatgcacaattcataggacacttcatggggactgtcccgttaagccttacaacaaggatcctcattttagatggggactctgaggcttaaggcagatccagggttaaaccttgcttgaatttatactcagaaaaggcagaatacagagaaaacccagagttttgagtcccacaggctggacaagttacagggtaatcataccaacactgacaaactgtcagaagcaatacatgatataaggatatatacatgacctggcacatggcaggtattcagcaaaactcattttctgccccttctcctttcccttcactgagcagaagccatctcccccttgggttcagcgtggccccagctccccttcagcctgaaagctactggaaaaacgtctggaacctgtcctgctggctgaggcagaggtggctggagggacctcaggctattgtccctgcagttcacagagccaaaatgctgaaacagaagaaactcagccatcagctgaactccttatttgacagacaggaacccaggggccagagagggctcgaggggctcacggctcctcagatgttgaaacagggccagtacactggaagctcagcaggcagtcatgcgccccctccctgatgctctgaagctctcctctgagttcttgctcccctagctggtgggaggagaggggcagcccagtaggtgggcctgtcttctccacagacactgtattctaggggagatgacctccagggcaggaggcccgaagggtcctagcggggacaagctgaggccgctccttttggcgggcaggctggggagtaggctctccgtgctgggtggtgagtcactccctagcatggccaggcccaaactcaaagctcagcattctgggaggtgtgcacgtccacgtgaacgggggtggcgaaaacagactgaggaagtggcgatggggctggcttgggcagattagctgtggccattcccacagaatctctgccacttcctcttgtgtccccagcttgtcaagcccagtgagtccccttctttctcctgcctgggacctacagaagggccaaggcttctccactctctggggtgccacagcaggtggccctggctcctgaggtgacaatggtgagccctctcatctccatggaatggaaaactttccttaagctgggtgtggtggtgcatgcctgtaatcccaacactttgggaggctgaggcaggtggattgcttgagcccaggagtttgagaccagcctaggaaacatggcaagacgctgtctctacaaaaaatacaaaaattaggtgggcacggtggcgggtgtctgtggtcccatctacttgggaggctgaggtgggaggatggctcaaggttgcagtgagcctagatggcaccattgcactccagcctgggcaacagagagagaccgtgtcttaaaaaaaaaaaaaaaaaaggctgggcacagtggctcatgcctgtaatcccagcactttgggaggccgagatgggcgaggtcaggagatcgagaccatcctggctaacacaatgaaaccctgtctctactaaaaaaatacaaaaaaattatccgggcatggtggcaggcacctgtagtcccagttactcaggaggctgaggcatgagaatgcgttcacccgggaggcggagcttgcagtgagctgagatcacaccactgcactccagcctggatgacagagccagactccgtctcaaaaaaaaaaaaaaaaggaaaccttcctcagtagatcttcagtgtccaggaagaaggtacggcagggatcaccaagtccattttacagatgagaaaactgaggctcacagaggtccagtggctcatctattcctcaggtcccaagcctcatgaacttcccactctactacactgtcctcctgagttaaggcttccacaagctggcccaacaacccctttgaagcaattatcccatgccagttcatggaacccaagggtggtggggcagctgccaagggcaaacattggagctggcacagaaaggacacagaagaagagcaaacacctcttctctagtagaggcctagtggtttccaggcttcctgccaccttcttggcagggtccctggcctgggcatgaaaggaagtcaggctcatatccctgcctggctgggagggccctacagcctgcagaacttaggaggggagctgagccttacttagtgagcatctacttgaccctggctctattaattaattatttattattattatttgtagagaacgaggtctccctatgttgtccaggctgatcttgaactcctgggctcaaatgatcatcccacctcagcctccagtctgggattacaagctggagccacagtgcccagctgaccccggctcttcatatgtagaacctcagttggattcaggagactggggttctgaaatgagtacctgtggatggggcactggctcacgtagacagaaatggcttggcctaaagaagatgatcgacagaaggtgctagtgaggaggttttgagaaaacagccagggaaagaagaagccacttcacagggaggggccccctgccaggacccagggatggggccgcagagaggaaagctgacctgccgccccagcacagcaggcagcacgtgctcagatgtgcttcctcatccactgcctttcatcctcccaagaacctgggaagggaaacatcactcttgtcacaggccaagaaactgccagagacaaccacaggctgtcagtctgaaccttgagtggcctggactccagcgggaggaccctgtcagcagtgtctctgggctggctgagaggctggcagcccagtcctggagagaggcacatcaaaggctgggagcgcagatgccacttacaggtttacaacttccacaagcacaggcttctctgtcctggcctggggagctgtgagaggaaactcccaggaaggagggactctggggtatcacagtcataaaagaacaggacttaaagtcctgaggcctgggttccagccttcattcagacaccaaacagttgaatcacagaaagaaacttctcctgaggcctcctttgtaaattgtggggattagactggatgatttctatgcttttaacaactctaaatgaccccaaaatgactggagaagtccccagccacaccctccagtggtggttaagagcatggatgctagagccagaccatgctggctcaactataaactctgccacttagtagctaagttgaacttgggcaaggaatttaatcatttcctacctcagtttccttatacaggaatatcagcccctgtctttgcctgatagggtggttatgagaattccctgagttcacacatgaaagggcagagcagggcctggggcatgcgaggtgctctttgtgcatgagatgcttctgctagttgtcagcacatgcttgtctgtctgtgcc

SEQ ID NO: 1418 - DNA, 125 bp, Homo sapiens
atggagtctcgctctgtcgcccaggctggagtgcagtggcaagatctcggctcactgcaagctccgtctcccgggttcacgccattctcctgcctcagcctcctgagcagctgggactacaggcg

SEQ ID NO: 1419 - DNA, 87 bp, Homo sapiens
ctcacgcctgtaatcccagcactttgggaggccaaggcgggtggatcacgaggtcaggagtttgagaccagcctgaccaacatggtg

SEQ ID NO: 1420 - DNA, 780 bp, Homo sapiens
ctatgaaggaaggagtcttgttgctgatatagtttcctgttgctgccgttactaataaccactaatttagtggcttaaatcaatataattatgatttatacctctgctggtcagaagtctgaaatcagtctgaaagggctaatatcatagtattagcagagccatgttccttctggaggttctagaggactggagaatctgtttccttgtccttttctggttctaaaggctgtccacgatccctggggtgtggcttccatccattttcaaagccagcaatcacattttgacttgtgctttcatcatcacgtttcctttttttactcacctgcctccctctatcacttacaaatacattgggcccaaccagataatccaggataaccccctctcaagatccttaatttaattgcacttctaaagtcccctttgccatgtaaggtaaggtatacataggttttgtaacgaaattcaggtccagaccacttgtcacttgaaagtttaagagatgagcattggtgaaaggatggttagctctattcaggaatccaacaacccaggggaggcagtgaactagtgttcaaagaccgccgagttctgtctccatatcaggggtttttaagggaaattagaaaaaatgatgatcaaaacattcttgtgaaatgtgcagtctcaggtcattgctttgttggtcattgctttcttggtcagtgttttgtggccttctgtaggtgccatcagcctattcttatcaggctggtcagcccattcccagagttg

SEQ ID NO: 1421 - DNA, 1459 bp, Homo sapiens
gaggttttcaccgtcatcaccgaaacgcgcgaggcagctgcggtaaagctcatcagcgtggtcgtgaagcgattcacagatgtctgcctgttcatccgcgtccagctcgttgagtttctccagaagcgataatgtctggcttctgataaagcgggccatgttaagggcggttttttcctgtttggtcactgatgcctccgtgtaagggggatttctgttcatgggggtaatgataccgatgaaacgagagaggatgctcacgatacgggttactgatgatgaacatgcccggttactggaacgttgtgagggtaaacaactggcggtatggatgcggcgggaccagagaaaaatcactcagggtcaatgccagcgcttcgttaatacagatgtaggtgttccacagggtagccagcagcatcctgcgatgcagatccggaacataatggtgcagggcgctgacttccgcgtttccagactttacgaaacacggaaaccgaagaccattcatgttgttgctcaggtcgcagacgttttgcagcagcagtcgcttcacgttcgctcgcgtatcggtgattcattctgctaaccagtaaggcaaccccgccagcctagccgggtcctcaacgacaggagcacgatcatgcgcacccgtggccaggacccaacgctgcccgagatgcgccgcgtgcggctgctggagatggcggacgcgatggatatgttctgccaagggttggtttgcgcattcacagttctccgcaagaattgattggctccaattcttggagtggtgaatccgttagcgaggtgccgccggcttccattcaggtcgaggtggcccggctccatgcaccgcgacgcaaacgcggggaggcagacaaggtatagggcggcgcctacaatccatgccaacccgttccatgtgctcgccgaggcggcataaatcgccgtgacgatcagcggtccaatgatcgaagttaggctggtaagagccgcgagcgatccttgaagctgtccctgatggtcgtcatctacctgcctggacagcatggcctgcaacgcgggcatcccgatgccgccggaagcgagaagaatcataatggggaaggccatccagcctcgcgtcgcgaacgccagcaagacgtagcccagcgcgtcggccgccatgccggcgataatggcctgcttctcgccgaaacgtttggtggcgggaccagtgacgaaggcttgagcgagggcgtgcaagattccgaataccgcaagcgacaggccgatcatcgtcgcgctccagcgaaagcggtccatcgccgaaaatgacccagagcgctgccggcacctgtcctacgagttgcatgataaagaagacagtcataagtgcggcgacgatagtcatgccccgcgcccaccggaaggagctgactgggttgaaggctctcaagggcatcggtcgagcttg

SEQ ID NO: 1422 - DNA, 396 bp, Homo sapiens
tgatacaaggcctggctctatcacccaggctggagtgcagtggcacgatctcagatcactgtaacctctgcctcctgggctcaggtcatcctcccaccttagcctccagagtagctgggactacaggtgtgcaccaccatgcctggctaatttttgtattttttgtagagacacggttttgccatgttgcccaggctggtctggaactcctgagctcaagcgatacgtcttcctcagcctcccaaagtgctggattataggggtgagccaccaagcagaatagtttcttttttccttttcttttttttgaaacagaatctcattctattgcccaggctggagtgtaatggtgcgatctcggccactgcaacatccccgtcccaggttcaagcaatt

SEQ ID NO: 1423 - DNA, 129 bp, Homo sapiens
agatggagtttttgctcttgttgcccaggctggagtgcagtggcgcaatctcggctcactgcaatctccgcctcccaggttcaagtgattctcctgcctcagcctcctgagtagctgggattacaggca

SEQ ID NO: 1424 - DNA, 130 bp, Homo sapiens
ttttttttttgagacagagtctcgttctgtcccccaggctggagtgcagtggtgcgatctcggctcactgcaagctccgcctcctgggttcatgccattctcctgcctcagcctcctgagtagctgggac

SEQ ID NO: 1425 - DNA, 465 bp, Homo sapiens
ggctggtctcaaactccgaggctcaagcagtcatcctggttcagcctccgaaagtgctgggattacacgcatgaaccactgcacccagccttaaaatttttttgtagagatgaggtcttgctatgttgccctggccggtcttaaacccctaagcccgagcgatcctcttgcctcagcctcccaaaatgctggaattacagggatgaaccatggtatctggctgtgcaactgtcttttaaggtggagtagatgaaggagagagagagcatgggggttttattattttttaaatttttggtttgagagagggtctcactctgtcacccaggctggagtgcaatggcgtgatctcagctcactgcaacgtctgcatcctgggctcaaatgatcctcttgcctcagcctcccaagtagttgggactacaggcatgcaccaccatgcctgcctaatttttgaatgttttt

SEQ ID NO: 1426 - DNA, 354 bp, Homo sapiens; identical to SEQ ID NO: 1382

SEQ ID NO: 1427 - DNA, 485 bp, Homo sapiens
aatgaaagggagaggggaaggtatatgtgtggtgtttggggtgggggttagttttagacaggcaggcaaggctgcctccctgggccgggggtgagacgtgagttggggagcacagcaggtgcttttgcagaagagagctccagggagagggaacagcaagcgcagagcctcaagcaggagcttctgcagcagcagagggagggaggtgtggcagggtagtggctgaccctcagtgtccttgtggcccttggaaggtctgtggagggggtatgacaagagtggtattcctttcattttaagggcccctctggttatggtgtcaagacacagagagatagagctgcagggcaagggcaggagtgaggggaccagttaggaggctgccaccatccgccagggacgcactgatgtggctcagagcagggtggcaggggtggcatctgctgagactcctgagatccaactgaaagagacaacaagtttta

SEQ ID NO: 1428 - DNA, 116 bp, Homo sapiens
ttttttgtatttttagtagagacagggtttcaccgtgttagccaggatggtctcgatctcctgaccttgtgatccgcccatgtcggcttcccaaagtgctgggattacaggcgtga

SEQ ID NO: 1429 - DNA, 1628 bp, Homo sapiens
tggagtctcgctctgtcgccaggctggagtgcagtggcgtgatctcggctcactgcaacctccgcctcccgggttcaagcgattctcctgcctcagtctcccaagtagctgggactacaggcgcatgccaccatgcccagctaatttttgtatttttagtagagatggggtttcaccatgttggccaggatggtcttgatctcttgacctcgtgatccacccgcctcagactcccaaagtgctgggattacaggcgtgagccacagcgcccagccttttttttttttttttttttttttgacacagagtctcaccctgtcacccaggctggagtgcagtggcgtgatcttggctcactgcaaacttcatctcccaggctcaagtgattttcctgcctcagcttcctgagtacctgggtttacaggcctacacaaccacacctggctaatttttgtattttcagtagagacggggtttccccatgttggccaggctattcttgaactcctgacctcaggtgataaacccacctcggcctccaaaagttctgggattgtaggcgttagccaccgtacccagaccctcataaaccttttaaatggaagtaaacataactgtgctctgaaaactgatgtttaataaaatgagatgaaaaagtgtttctaaatccatacattgaaaaatacttgatatgagtaaattaataactaagtgctataagaagatattcaaccattccatttatagtcctaaaagtttgtgtactcaagctgacaaaaaattgtttttggattttctaattaaaaaaaatggggaggccgggcatggtgtctcatgcctgtaatcccagcactttgggaggccgaggtgggcagatcacgaggtcaggagatcgagaccatcctggctaacacagtgaaaccccgtctctactaaaaatgcaaaaattagccaggcgtgggggcacaagcctgtaatcccagctactcaggaggctgaggcaggagaatcacttgaacccgggaagcagaggttgcagtgagccgagatcgcgccattgcactccagcttgggcaacaagagcggaactccgtctcaaaaaaaaaaaatggggaggccaggcacggtggcccatgtctgtaaccctagcactttggggggctgcggtgggtggatcacctgaggtcaggaattcaagaccagcctggctaacatggtgaaaccctgtctctactaaaaatacaaaaaattagcagggcgtggtggtgggtgcctgttatcctaggtacttgggaggctgaggcaggagaatcgcttcaacccaggaggcggaggttgcagggagccaccattgcactccagcctgggcaacagaaggagactttgcctcaaagaaaaaaaaaaatttttaatggaggactgtgcctcatatttatgatgaaggcgataaaatgttcacagatgtgaaattagcccagctaatttttgtatttttagtagagacggggtttcgtcatgttggccaggctggtcttgaactcctgacctcaggtgatccaccggcctcggcctcccaaagtgctgggattacagccgtgagccaccgtgcccagccaaaattttttttc

SEQ ID NO: 1430 - DNA, 1366 bp, Homo sapiens
ttattgatatgatgatgattaataattaatttatttccattttcactttcatactattcagtcccaattctctggaaaaaaaaaaaagaacactggaaaaaaacaggtttactattatatagcagagaaataaggataatgtttcttggtttcaaagttctgatttgtaagttaaaccaagtcaatacaaaaaccttccttcagccaaaaaaaagtagggaagtaaaaacccttttgtaaatccttgttattaggttgctatgaatctgaaatacaatatacacagattatatccttaagcattaggttggcacaaaagaaatcgcggtttttgccactgaaatggcgaaactgcatttacttttatatcaacctagtattataaaatatatacaaagcaagttgaggaaccaaacacaaaatacatgtctacaaacatgctttccaatgtactataaataaacctttacttaagatcttgaaatcaaaattagtttgtatagtattcagaatcaaacctaatgacaaagcaagatgaaataaccaacagcatcatcattatcagaatagtaactaacatttatataaaagattactatgtgtcagaaactaagggctttcatttcattcaattctcataacaacctataaagtaggtactatcattatatccattttacagatgagtgaatgaaggctagaatttgggtcaccggcccaacatgacccaactattagtagtaggtagagaagcgggtctccgaacctaggtaatctggctttggaatctgtgctcataaccactgtgctataatgtctctgatagcagctactaattaaaaaataaaaaatgtatgttttcctaactttaatcatcaccagataaggaatattcttggttcatttatgtctaaattttcaacatactttttccctttcaacctattaactatcctcaattttgagtcagctgattttatgtgattgtttccttccctcccacccccagtacactgcctttatgtggctgcatttgtattagtctctgcttagaaaaccaaaaatgtatgacatgattaaaccttgtttgttcaatataaaataagagttaaatactttccataactttgctctcttctcaggccttcaaagtcttgctcagtaaagtactgttgatgctgataatcagagtatcccaccaagagcacatgatgccttggactgcaatactgtcacagcagtgtcttcagttcttctctactgtgtataatgcagagcaaaatgggggtggtggtagaaattatggtagtaaatatatattttctagaaatatatccatttcgtggaaagataatattaagaccat

SEQ ID NO: 1431 - DNA, 786 bp, Homo sapiens
gatggtgttggcctaaggcctcttggcccttgttaggacttggtttaccatggcgcaacacatccatgagattggcaaaaattaaaaagtctgacaacagaaaatctggtaatctggtgaggatgtggagcagtgggaattctccaatactgccagggagcatgggcatcaatcccaccacactggaatgcaaaggggcattctgagtagaactgaagatgtgcccatccttgaccccacagttccagccatgggcatgcgcatgaatgtgcacacgtgttgactgcggcatttgtttgtcattatgaaaacatctaagtttccatctatgggagaggggatatgtgggagtgcccaacagtggagttctagagagcagtaaaaataaatggactagagctgcacacgtcaaaatggatgaagataaaagacatgagggatggagagcccccccctggccacagaagtatatgtccaatatgatgctggtgtatccagagtgttcaaacaaacaacacacccactactcattgtttccaacgtgagtatgaaagtatggagcagtgcggagggccaggagtgctgaatccacatggttacttctccaggcgggggccgaggaccagggctggaggtttactccaggagcttcagtggtgcatgctgaatgtgctgtttcttgggctgggggacagagatgtgcatgctgttatacactctatattgaaatgattgtataacaatatactaatttatcatgtaataaatttgaccagaaagaaacaa

SEQ ID NO: 1432 - DNA, 485 bp, Homo sapiens; identical to SEQ ID NO: 1427

SEQ ID NO: 1433 - DNA, 116 bp, Homo sapiens; identical to SEQ ID NO: 1428

SEQ ID NO: 1434 - DNA, 913 bp, Homo sapiens
tttaataacagttgttcacacatgtttattgataaaccgtccaaaatgtaggtcatgtgtaaacaattccagttgttgggtatattgggtattgatccctgcagcctcctaaagtgctttggacatgaactgacccgcaaagcaagggcaaaggcctcagatgcacagagctgccctgacatcccttggctcggagtccctgtgccccatgtcagagccctaaacctgtctcccctgcctgcactgtgtccggcagacaaagggcagctgtctgcacggtgaccccgagtacccaggacacggaccacgaggacccaatgaaaatgtcccctttcaccatgatcggcagcccccttcccacagccccgccagcccacaacccccctcccacggccccgccagccgtcctcacagggcaggcggcatctggcatctccaccagcatcacacgcagctgtccctgccagctaggcaaggccgtaatgaccggcacaagcttgggcttgggccgtgggcagcaggagggctggagaggcatggggggaaccccgctctccctccggcatggggcctccacctgcagcagtaagcagcctctcagcccctgagcctggggacctgcccgggcagcacagggccagggccaagaagtatttgtgagaaggaaggtggcctccgccacccctgcctagcaggcctctttctgctgccctttagaaggcactgggtggcagaggaggaaggggagggaggtgttccaaagccagtgcccacccctccacagagccaaccccagggcacacaggaagcagccaccacacgtgggagacaggctgccctcgtcaccgctgccctccagcccccccttcaccctgccctcctgaccctcccacccctgccttcctgccccccc

SEQ ID NO: 1435 - DNA, 634 bp, Homo sapiens
tagcatagtgcctgacatatagcagtttcttaataaatgaagtcattggtctattactattattgctactaatgtgcaataataatagacaaaagcaacgtagaggtgaaagtgcagacgcctggcctttgccctggggtttcccctctgctgaggaatctgtggctgctcagctttaagggtgcagggaggtggccacattcctcaggccccagccctggcctcaggcatgaggcaacaaggaaagcaggtttaccttcagggcaatccttgggaaaagaataattttagggacaactagaaggctccgtggtctctcaaatatctctcctaaggcctggatgctgcctaaaactcatttcagggtagccacaccactcatcctgctaggacagtaagaaagctcaaatacgccaatacccaggaaagggtacacaaaatgtgagtatagttcaggcaaacagcataaaatgatatgagatcttaagagctgtgacactagagacttttctcttttttaaaatttttttatttccataggtttttggggaacaggtggtgtttgtggtgtttggttacatgagtaggttctttagtggtgatttgtgagactgtggtgcgcccatcactcgag

SEQ ID NO: 1436 - DNA, 634 bp, Homo sapiens; identical to SEQ ID NO: 1435

SEQ ID NO: 1437 - DNA, 1403 bp, Homo sapiens
actgtaccaaggcttcagagtgagcagggggacatctggataggttagccagggccacagagagaagagctgcttacacctgaattgtttcacccttttcaagaacagggttgtccttctccccatctggatccttgggctagatctctgccgaggggctccgtcaagtcccgcaaggctagagaagggagccccacatcatttccactttcaaagagggaagatgctcgtcattcaaattacttctgttgatttccatggtatccccctgtccgtcccacaatctcttaccaggcgtcaatgcacatgcaggggatggaaagaggatgagccgatgagcagactttgcattaatcaaggagaaagaaaaagcagatggaaggaggtaggtagatggagaaagcaacagctccttttagcccttgatgatggccctgaaggcctgtctcttttagtgactcctctttgggtcctcttcccctacctctcagtgactaggttcctcatattaattccctgctgtgagtttggctccttgtgctgggcaattcagtcatcctcagaaagagcaaagttggtcttggaattaaggtgcaggtggggaaaaagagggactcagctagacacgaagaaaggctctcttcccagtctaagcccttctaccgtaaggggcattttatcaagacagccacccaactccccatcccatctcccctcctttgtagaaacagcatttgactcaccaagcctttctctccctttccgtgtgtcttgcttagtttctggattgagagaatttctatccttgctccctcgaactctaaaagagcttcttttgaaaactggggagtatcaggcctacctctacatgtgcaacagtgccaggattcaaaggaaaagctcattccagcctctgcctcttgggagatggttcagagtgccacatagggactgaaagagggtgtctgaatccttcaggaatgctttaagtgacattgttgaaaagagataaagaaaaggaaaacaatggaattgggtttctaaggtccctggaaatatcctgggggtctaatagagaaagaaaataagaggaaatttgaagactcacttcttccttcatctgaatccactcagatggcaactgatctctgtcccaaggaccctctaccccacccaattcataatcatctcagattagaaaaggcagaattccttcccattctcaaatcagcatttgggttaggggcccctaagttacgtgagcatgttagaaatgtgaccccaggcctcaagagagaggctctgccacatgagaggagataggaatcatgactgaaaggggattagcacagaacagagaaaactgatttgatagacaaatcaaatagaaaatataaaaaaaa

SEQ ID NO: 1438 - DNA, 10337 bp, Homo sapiens
gcctcatcatcgttgtcatagttgggcacagtgctgaagctgccagctcgctgctcatgggtaataccacattcgggcaagttttctacggacctcgtactccgaattcggttctcggggatccgggcagggacactggtggtgtcaaagttttcacattcaaggacttccacataaatcaggtagggagcctgggggaagagtgagacagtatttgcaacttacttccaccactaacccccaaatctcaactctgttagcaaggttcttcctgctgtcctttctcctagctccagccttcatccaatagtcctctgaaactatgaacactatatttagggcagatacttgtcctatgatcacctatgtaaagaatttgtgtgacagaatccttaagtcttcaaaatatttcaactgagctccaaaatgtacagatgatgtgcttgggccaaaccactctagactatcaattacaggctgtaagggaggcctagatgcctctgtgggctcgtcctgaagacagggcccagggagctacagtggacaaaaagactgggacaaagctgggcactgtcccaaggagtgtcccaaacttcagtatttcctttgaaagaagaatatgggccgggcgcggtggctcacgcctgtaatcctagcactttggggggccgaggcgggtggatcatgaggtcaggagttcaagaccagcctggccaagatggcgaaaccccgtcgctactaaaactacaaaaattagccgggtgtggtggcaggcgcctgtaatcccagctactcaggaggctaaggcaggagaatcgcttgaacctgggttgcggaggttgcagtaagccaagattgtgccactgcactccagcctccgcaatagagtgagactccatctcaaaaaaaaaagaagaatctgaaccatgaatactcattccagtcagcacacaaattcagctaattctctccagtgtgaattgggcatccttctctccttttgtcggctcattctgatcagaaaaggtcttagaaacaaaatatttctctatccttatggttgctgtatctggaaagcccaagagttatagaaaggctggagaaaagctaccaaaatgaccataaggtggggtgaagagcaattctcctaagatacagcaagaaggaagctaaaaagattaggtttctttggtccagaaaaacaaaacccaaaaagggatacaggggggctctcaaaatcacaatcgcactgagacagagtcatggttgacatatgcatcatgaactatgaagggagtctaggatgttggtgagggcctcactggtcatacacgcaaactctgaacaaccatgggtgaagagtcacgtccagggtaggggtttgggccagaacccatctaccttgtccttggagttgaggacaacagcctgtgtgtggggtacacggaccacgtggtggtcaaagccagcagtgggcagccagactcgggcagggagcttatggttgagcagggagagctctgagatcagcctctgtgttttctgctctttggtggggagcgtggccagccgcttgccgatcgccatcagggacttgatgaattctctctcaggagccagtcgaacaggctacaggggtttggggtaagacaaaagatggtgaagaaaccatagaatacaatggcacacccactcagtcactcctggccatgcaggccggggaccccactatctggagaactccaggaaaggagctgctttttagtcttagtaggagcttccacccacccttcacaacttgaattgagaatagccagcacattccttccctataggctatcccttgagggtaagggaggccatgagtccaggtaactgggatgcactcctcttctcctggacttgggttccttaaggactgtaccaaggcttcagagtgagcagggggacatctggataggttagccagggccacagagagaagagctgcttacacctgaattgtttcacccttttcaagaacagggttgtccttctccccatctggatccttgggctagatctctgccgaggggctccgtcaagtcccgcaaggctagagaagggagccccacatcatttccactttcaaagagggaagatgctcgtcattcaaattacttctgttgatttccatggtatccccctgtccgtcccacaatctcttaccaggcgtcaatgcacatgcaggggatggaaagaggatgagccgatgagcagactttgcattaatcaaggagaaagaaaaagcagatggaaggaggtaggtagatggagaaagcaacagctccttttagcccttgatgatggccctgaaggcctgtctcttttagtgactcctctttgggtcctcttcccctacctctcagtgactaggttcctcatattaattccctgctgtgagtttggctccttgtgctgggcaattcagtcatcctcagaaagagcaaagttggtcttggaattaaggtgcaggtggggaaaaagagggactcagctagacacgaagaaaggctctcttcccagtctaagcccttctaccgtaaggggcattttatcaagacagccacccaactccccatcccatctcccctcctttgtagaaacagcatttgactcaccaagcctttctctccctttccgtgtgtcttgcttagtttctggattgagagaatttctatccttgctccctcgaactctaaaagagcttcttttgaaaactggggagtatcaggcctacctctacatgtgcaacagtgccaggattcaaaggaaaagctcattccagcctctgcctcttgggagatggttcagagtgccacatagggactgaaagagggtgtctgaatccttcaggaatgctttaagtgacattgttgaaaagagataaagaaaaggaaaacaatggaattgggtttctaaggtccctggaaatatcctgggggtctaatagagaaagaaaataagaggaaatttgaagactcacttcttccttcatctgaatccactcagatggcaactgatctctgtcccaaggaccctctaccccacccaattcataatcatctcagattagaaaaggcagaattccttcccattctcaaatcagcatttgggttaggggcccctaagttacgtgagcatgttagaaatgtgaccccaggcctcaagagagaggctctgccacatgagaggagataggaatcatgactgaaaggggattagcacagaacagagaaaactgatttgatagacaaatcaaatagaaaatataaaaaaaatcagccaaactcccagaggtcctgcatttcctctcacgtctttgcccagcaacaaggtccaagaccctgtgggaccaaagggtcaggggttagtccagagggaacaagaaaggagaggggattaaggaacatcctgggcagtgagctgggaaaagggaagaactcagacctggaaaaaatgtggttgaagttaaaaaagaaaaccagttgtggagaggcaaaactttccttcaggccaagtcctatttgtttttggagtcagctcaccagcacagggcctagcatttagaagattatgaataaatatttgataatctgacggcagaagccatggggaaagggttctgggtgggagaaacaggatcctgggggtttctgccaggcagtttttggctctaatccaggagtgaattctacctctctcccagctgtttgctccagacactcaggagctgggggctgagcagcactgtactccagctgtctctgagagaaggatcagctgagctcatctcagcctgggctcaggatttccaccgcaaaggtcaggggaactccagcagatctgggaggtctgggagggaggagctgatctcccagtaagaaaaggggcattttaactccagccttggcctgggggctcagaagacctggggacggagaggaaatgcggccactgggggagcctgccaccccgtcccagcctggccccacttacggaactgaatgaattatcaatactctcggtgctggaggagagctcctgggaaagggccagagggcaaagggagaaggagggggtgggaagggaggggagagagacaaaggtaaagaatttagctccaacttggatcgtaactgcttctctagtgcagttctacctttctgctttaataaaagaaagtcaactcagaaatgctacttgcccagatgcttgaccacttgtaggagatgctggaagggcagctcagactttaaggtcagaaggactgaagagacaaagcagcctctgcttttcactttattcacttctattctcaactgaatggatcttccttctaggccaaagctctaaagctgggtccctagggcagtaactgcactgccaagcttccctgctctttttttttacccactcacatgctctcaaccaaatccttctccatggggaccaccacaggactgaacttaataagctgcatggctcccatactggaaaccccatgttcctccagctttttggaaacctcagggaggaagaaaagctaaactttcagtggcaggtatacctcttctctaattagcctcattatcaccctgggaagctgaatcccaaccttgaacctctgtgacaaagagcatcctagaccaataagcccaaaatctctgggctggatgctgatgggagtgaaggataaatcaatctcctatctaccaaacctccttaggcttcctatcaggctatccacatgacaatcaatatactacaatttttgatataagttggggagttagctatatccatctagaaagctgactagctggatagcagctgtcctagtcccagcccagaggatttatctaaacatcaccccattgctgtgtcatatgtgtccgtgtgcaaaaacaggggaaagagatggtgtcaaactctcactcagcagctctgaggcaacactcatgcacagggctcatcctgggttctgtccaacatggtctaccagggcagggaacagagcagcacgtgtgcacaaatctaggttgtgggggacgttgaggtcggggtgggggaggttagacttaaaagacaaagtcctaagagctcccagggcaggagggcagtggtgagtttctactctgaaatctgctgagtagattcaagcatccacttgaactcaattccatggtttcagttctattctagctggaggtcctatagtcaggtccttccttgaagaatctggggactggagcactttgagggagaagccacatttggaaacatgcccctaaggcaacaactcttccattttgggtagaaggtggtgggagaattaaggcagtgaggatgtcagagtctattatgaattagtggttctatttctacctatgagctggttggagaaggaacagcaggcaagatattggctccctgagcaacgctccagctgattctgtcacagacaggtcctgtctgactcattgacagccctgggggaagggaggtatatcatgacctgctcctctcctactccctgggcttgagtcactcacactgagtcagctccggggagtaaagatgaagcaagaagctgacatcacaccatatcaagctagaaggcctactggggcttccagtgtgacatgcggcagatttctctgtacaaaggttgcagtcctgaaaagacaaagctaatctactaacagtgtcatcatatcggggagggtgtgatacctaaatcactctctccttttagctcccccattctataccaaaatatttgccatttggttacaaatgggaggacaaactgcctgggcagagttccccgactaggctgataaaatggctttgaagcggcaggctttgaggagcagtggtggaaaatgtgaaaaatcagcacaaagccttctgactgtgggagagagtgtaaaggattcctcatagtaagaaagagaacactgtgagagctgagcagagaacaactctgcagggagaccatgggcaggaagagaactgtacatgctgcccctgagcctcttctttgaggcccgacctcatccttgggagcccctctactggtggtaggagcatagtattaaactcagaacctaaaagaaaagcaagagactgggagcagagtgttagggtctacctagagattctcctagagtatctctgcttaggtcttagataattatgtgcctcattttagtaagctgtatacttcctgcttatggcagaaaacaactttttcaagagagtcacaaactaaacagttccatagatactggggttttcattattacttcacatgttcctagagggaaggataacattttatcccccgtcctccacagcacagctcacggctttggacattgtacaaagtcaataactacatgttgagtgaatgaatgttacatgaaagggaagaaggatgagtaaaaggaaaaccaattcctttggtatttaggggacaaaagccttgacagacgcatcctcaaaatgccaaaggggctgggtctagtcactcatgcctgtaatcccagtgacttgggaggctgaggcgagaggatgacttgaagccaggagtttgagactagcttgggcaatagagcacgacctcatctttacaaaaaaattttttaaaaattagccaggtgtggtggtacatagctgtagccccaggtacttgggaggctaagatgggaggattgcttgagcccaggagttaaaggctacagtgagctatgactgtgccactgcacgccagcctgggcaacagagcaagaccctgttgcaagaaaaagggcggacggacagacagacgggtgggcggaaggaaggaaggaaggaaggaaggaaggacggatggaaggaaaagggctgggagagacccctgtgctgacgactctaatgcttagaaacctagtgatattcatgtttctgtctctttcttgctctcccattttctgtggagccataatgaattcaggtatttcattctgtcagtatcagataacgcaggagtgcctgggaacatagtatctccttcctctcctggatctagtgacccaagataaggagtcaggttggaagaacggcagctacagaacccaccctaaatgatgtaagtattcacctaatacctgcctctcagtgccatccataatcttatcctggagtgggagttagatgtaaggaaagagggaccaaggatcagcagagtaagaaaagccctgaggcctcagcttttctggtcctaagatgagcactacaaaatggataaagagaaaagccaagcctgacaagaggcaccaaggaattcacttccagctgctcaccctctgctacaggtttgactccaagatgagacagctatccaacccttcatgttccactagaatctggatgactcttcttgttctgcagcaacttctcttcatgacccagggctctgctgccaagctcaaccagatatgaaaacggttcattctagttctgacaacagttttggctttgcctgtgcatggatgtggaagctcagatggccatagcctgggccgttcttccccacatggcttctgacagctggggaccttgggaagtagatattgagaaataaccaaggtagttcagctgaatgattatgagcaccagctggagatttgagtcctggtctgacattcactagttgagggaccttgggcaaaacatctaatctttctaagcctcagtttccttgctggcaaaataatacctgtctctcagcatggttgtgaggattaaatgtaaagtacttggcaagatgcctggcacataagtgctgaataaatgttagcacttttagctttaccattattaaactatcctaacaaaattccaaatttccagagagcaggctctatagtctccctccctcttccttttctctagtcactctgacttccctctatttgaaagaagtcccattgtatcaaaaacgtgggtgggttatatgccccacagaggcagatgccaagaccatagctatccgcatttttcaaaaagtgcaaattcctcctttttttctccctcttttctaggctgggttggaagccaggatgggagcctggccaatggtgagtcagaggggaggactggagcaccattgtctggctgggacaccaggtcactgacacttggtagtccactgggcagctttccctgctatctgtccagatgtggagtgaagagtgggtataacctattcatgtggccacctcttccctgctctatatcctaagttatacctccaactgctgctgtagcttcctcttcttcccagcctccaggtccttgactaggcactatatttactctatactaagagtgctttctcttccctttgtgcttctcccaaatggtatgggaaagataccagcaaggcactcttccccctaaggaaaggcaggcaatgaaggcattctccagatgcctcagtgataagaaataaaccttacacttatgtcaacaaaaggtaggatcttcagagggtagtgaaaagggattagattatgaggaggagtggccaggagaatgaagccgatgttctaacatctcccctaccccagcacacagaaagacaatagtaccttttcctttcccacagatgctgctctgagaggctctggtagctatctcaagtctcaggtcagggtgtggagggcttctgccacagttctcattaacatagtagatgttaatggaatggcagtttatttatttatttatttatttagagacggagtctcactctgtcgcccaagctggagtgcagtggcgcgatctctggtcactgcaacctctgcctcccaggttcaagtgattctcctgtctcagcctcccaagtagctgggattacacgcgcccaccaccacgcctggctaatttttgtatttttagtagagatgggattttgccatgttggccaggctggtctcaaactcctgacctcgtgatctgcctgcctcagcctcccaaagtgctgggattacaagcgtgagccaccgcgcctggccagtgcagtttaataaaaatgatttgggacacagtcaggagcgtcagccttgccatgacctatatgacctgaggcaactcactttatctctctgggtctgagttcttcctttgtaaactaaggcaggcaaaatacatgaattctaaggcctttccattctaacattccatgcttttatcagtgaaatgaaacagggaggacagaaagaacagcgtaaccctgtgtgtatataggaggcatcctgtctccatgcagccctctaccaccttttgtctctggccctccccagaattttacctcatcctcattctccactttagggttgctggctgttcgtttcaggttgctgctgagacttatgctggcagtggcatctgacttagagcgctggtgagtccttttggagggagacagccctgtgtcaggggccgggctcaaggagggcagctccctcttcctgtgagctggctttagctcatctgagaggatcagcttccgtagcttggtcccacgggagtgtcgttgagtggaaatgtgcatgtctgaagaataggccccaagcaacagggcacactggagggaaaagttaatgctctggcggcaacggtggactatgtagggcttaatggcatcacccacgtcctcatccatgtggatgtacatgttaagcaactggggcagatagaagtccacgtcctcgttgcgaaagcagaagagccggttgccaatgtaggcttgtactccaggctccttggagttatacaggtatgaaatggccatggagatgtcaaacagttttgactcaaacagcctcagcagccaagactgtttagctgagttgttctgccgccgtcttcttgctcctttggctgtgcctgaggccacagcggcccccatctcatcttcctcctccctgatctgggcaggtggatcatctaggcaacggatctcactgtccacaccatccccattgaccaactccagtggggtgcctctgctagagactgccacgcctccatgcaaaagcttgactttctccaacacctcctggcaggccttctgggccacctcagggtcaatcactgatagttccccgaccccctccgtgatgacacttagcagggaccccccattattccctggtgggccagaagtgggctcagaagttggcttcaagggggcaggctccactactgtatctcccatggccacagccagacttcgagcttccaag

SEQ ID NO: 1439 - DNA, 274 bp, Homo sapiens
ctccatctcaaaaaaaaaagaagaatctgaaccatgaatactcattccagtcagcacacaaattcagctaattctctccagtgtgaattgggcatccttctctccttttgtcggctcattctgatcagaaaaggtcttagaaacaaaatatttctctatccttatggttgctgtatctggaaagcccaagagttatagaaaggctggagaaaagctaccaaaatgaccataaggtggggtgaagagcaattctcctaagatacagcaagaagga

SEQ ID NO: 1440 - DNA, 117 bp, Homo sapiens
ttgttgttgttgagacggagtctcgctctgtcacccaggctggagtgcagtggcgcaatctcagctcactgtaagttccgcctcccgggttcacaccattctcctgcctcagcctcc

SEQ ID NO: 1441 - DNA, 998 bp, Homo sapiens
ggccaacatggaagccacagggtctctcgtgccctgatctgggaagtggcaggccgccaccaacactgctgctgttgttgttcatgctaagtcttggcaagcctctgggtcgcacgtagggcatgtctccattcaggccagccgcatttcgagccacacgtggttcgtggcaactgttggacagcacagatgtagggcatcaaaagcctatgaccgtatgcaacctggtgcttctgagatgctcacgtggtccatgggtagaagttgttcacctgaggtcttggctacctggcattagcccacacacagatattagtgtgcccacctagtgtgcagagtagcttaggggtgcatccctctgtttctgccctagctgataattctcttgaccacaggatcccagtttcccttcctttatatgtaagacactttgttcagtgtctttatttcataatcactgtcgagaaatggaggtaaagtagtatcagttgtctgtagacttagtggcagattgtgggggaggctgcatcccaaagctgggctggccctggaggacaggctcagggacagctccatgtcccctctcatgggtgccaaaccattctgtgagtgcctgtgcttcaaaggtgagcccggagagctctgtactcggccccctctggccttgagggaacgggggctgggaggtttctggctggaccctgaggggctgcttgcgggctctgggtctttggacttggcaccgttgccttggcatttgttggcttgggagttgttgctgctgctttttcccagatgcatgggcctgctaatgtcagtgtttgacaaaccaaggagaggacactttcctgagctcttgaagtccatgctttatcgtttttgccttcagatttcagagcgacctagcagccgtgtgtaacaaacacgtcacttgtccctgtggagattggcccaccagcctccactggcaccctgtccactttaacaagcacactcga

SEQ ID NO: 1442 - DNA, 998 bp, Homo sapiens
ggccaacatggaagccacagggtctctcgtgccctgatctgggaagtggcaggccgccaccaacactgctgctgttgttgttcatgctaagtcttggcaagccactgggtcgcacgtagggcatgtctccattcaggccagccgcatttcgagccacacgtggttcgtggcaactgttggacagcacagatgtagggcatcaaaagcctatgaccgtatgcaacctggtgcttctgagatgctcacgtggtccatgggtagaagttgttcacctgaggtcttggctacctggcattagcccacacacagatattagtgtgcccacctagtgtgcagagtagcttaggggtgcatccctctgtttctgccctagctgataattctcttgaccacaggatcccagtttcccttcctttatatgtaagacactttgttcagtgtctttatttcataatcactgtcgagaaatggaggtaaagtagtatcagttgtctgtagacttagtggcagattgtgggggaggctgcatcccaaagctgggctggccctggaggacaggctcagggacagctccatgtcccctctcatgggtgccaaaccattctgtgagtgcctgtgcttcaaaggtgagcccggagagctctgtactcggccccctctggccttgagggaacgggggctgggaggtttctggctggaccctgaggggctgcttgcgggctctgggtctttggacttggcaccgttgccttggcatttgttggcttgggagttgttgctgctgctttttcccagatgcatgggcctgctaatgtcagtgtttgacaaaccaaggagaggacactttcctgagctcttgaagtccatgctttatcgtttttgccttcagatttcagagcgacctagcagccgtgtgtaacaaacacgtcacttgtccctgtggagattggcccaccagcctccactggcaccctgtccactttaacaagcacactcga

SEQ ID NO: 1443 - DNA, 998 bp, Homo sapiens; identical to SEQ ID NO: 1442

SEQ ID NO: 1444 - DNA, 314 bp, Homo sapiens
gcattcacagtgcatgattaggaccccaccccgaagccgccatggctgtcggtgcagagcgaggttaaagagatgggattgctgatgtctcattccgtgctggttgaatttgtagcttttacaagaagacgacgtagatgagaagctgagaagtaagcctaagccccgtgtgtttgactggggctcctcaaggtagtcctaggaggccagaagacataaagaagacacttgagttggggtcagtgctgccatctcagggtgaggccaggtctcacctccagaacccctctgcctctcctcttctggtgccccag

SEQ ID NO: 1445 - DNA, 314 bp, Homo sapiens; identical to SEQ ID NO: 1444

SEQ ID NO: 1446 - DNA, 314 bp, Homo sapiens; identical to SEQ ID NO: 1444

SEQ ID NO: 1447 - DNA, 1899 bp, Homo sapiens
tagaatcatcaacaaaactcgcatttaatgatggtgttgacctgaggaatcttcaggcagaagcttgtggtcagaggggaccaccagcaaagaactgacccaggtcttggaccaagagtctcccagagagagtcaacctcccagtagaagggaggccaacccctccactgcttcatgaaagaagactaaaaattctcctgggggaaagaaacacggtacaaaatacattcagagccccctgggtgggcctggggcagcccaaatcctacagatgagggaattggggaagtgtgccacaggtctaatccctgtgcccttgctttgcatggccaggttccaaggggcggaatgtattaatcatattcctcttacaaaaatatatctctttacacgcaccttctccatggtctctttgctacttgggaatgagcatttacctgcactccaaggcttcagagggactgcctagggaggctactccaatagaatagcaaagaggctatgacctatggctttttcatctacataatgatggatggtgcaggtttggactgggtgggaagctactggtatccagggttggggaagagatgggactctggaccaacactttgtaagattgatgctccgtgatttaggtcctcagaaatccttcggtttggcatttcagcatcaagagagcagtgtttgtatagaaatgacacaatttcattcaccccattccttaaagggcccccaagggaagctggccctgttggactatgatcaaggggagatatatggtctgggaaggtagtgggggtccattttgggtgtggttccatctgattaagaacactcttgctgtctcacctggatagcaaaggacccatttgtaggggtcagaagggcagtgtaagactgactggagcccaccatggagagatgtgtcactggggctctctcttaagtcaaattctgcacatggcatgtgaccatcctcgtgggctcactgttggtgcctgaggttccttgaaggtggtatcaggatctcaaggtcacctcctggacacagcatggatagaaaggggcagggttcatgccctggaggtggaaaggcaagcagctcatttctgagaagcagtgtggcctggggggctcataacaccaatggccccacatggtgtctccaattaacctactgtgagcaccattacctccccacactatccaggatgtcagaaacctaaggccacggagaaacttcccagcaatctttctttagaacagaaggtggcctgagttaaacatcggtgccagcacttcttgggtggagatgagaagggggctgcgaaatctcagcccagaagggacaagcatctggggccaagtttttacaatagccccctgggctcttgcatcaagagccttgacaattgccatggggcatccagcaagtctccatgatgtggatgagccctccctcccacaaatggaacccagagtggtgggggcagggacccaggagacagaaaagagtccatgtaactagaaccccctaaacaagatgccccacattgccaaggggggaacatgtgagcagagtggtagtgcctgggcaatctcttcccttgagcctcctctgtcatgcaggaaactcattgaaggcaaagagcagccaaggggattgtccccagaccaaagagaggacagatgagtgggggtaaccaggggtcttgagtccccagggcctgcgtggtcaggactcccagtctaccctccccctgtgtggacgcatcatcttgggtagtagtcatcggggacacccgttaggttccgccctttgagggctgcatccaccatcttgatgtaggcagagatggtcttctgcatgtccgcagtataggggtcatactcgag

SEQ ID NO: 1448 - DNA, 104 bp, Homo sapiens
gcaggctgaccatccggcccagctggacaaagaggtcctgcttcaggtcctcaaagtgcaccaccagcaccttcttgccaaacttgagccagtccagtgtgtga

SEQ ID NO: 1449 - DNA, 456 bp, Homo sapiens
gcttgccttgtggcactggcagcagcagccaaccacagtggcagatgcagatgagaaatgtcaatggggctacagggatgtggagatgcaggggctattgggccccagggcagaatgcaatctggtggctggctctcaaaatggtactgtgctgtagctgcttagggctcggggagttcatgagacccagcatgagctccctgtctggagcagtgccattatgaggtctctaggaagctcctcatgttagtctcagggcctgtgagggttgaggagcattcccattgataggattgcaggagtcttcaatggaaatatggaccactgggggtctctcactctttctccacattgagaaacctctctgcgctcccagctaatcctggctgagcaggatgcctggcttcctgctccttccttgccttggatgtttcctgtcacttctctgttgaatgc

SEQ ID NO: 1450 - DNA, 260 bp, Homo sapiens
tgagatggagtctcgctctgtcacccaggctggagtgcagtggcacgatctcagctcactgcaagctccaccccctgggttcacaccattctcctgcctcagcctccccagtagctgggactataggcccccgccaccatgcccggctaattttttgtatttttagtagagacggagtttcaccattttagccaggatggtctcgatctcccaacctcgtgatctgcccacctcagcctcccaaagtgctgggattacag

SEQ ID NO: 1451 - DNA, 1532 bp, Homo sapiens
tgtaactgtataatattgacaatcgaacaaacagcttcaatcatgtctattcatatctccaggcaaagttttgttcttcttcctttattttacaaatgtaagcttcaaaggacacatacttttgtggataaacaatttccactagaagaagaacagcaaaggtagctatttaatatatgcagttagagccatgaggtatggatcatagtaaataatattttgcaatgatactagcactaataaagatgatgacatttgcatgattagctatgtttttagtaaagcaaaattaacggataggaatatttagcttgaaggatacatacaacatgctgacaaacaaaactgagtttcagcataaaaatggatatattacacagagagtatacataggctcctaatgtctctgtgtgcatttgtatgcatattattcatctagtattttctttttacttccaagttggaatgcatttacttcatatcttattataagcccatttggtaacacttctgtcagatttcagttgcatattcactgttgaataaatcagtggttaataaatgtccttggaaatgtgtttagagataaataatgaactgctgtatctgatcattaagtgtacatcaagctcacatttttactctcagaatcctaaaaggaagatagcatgacctactatatatgtacatggaaaaaagggaaataattatagagaaaacatgtaaaaggagcctggtttattactcttaaatgggtacatgatagatcaaaataaatgttattacaactgatcaaaaaatcctactgcaaaggaaataataaataaagatggagagtcaacctgtccatcataagtgctttttgttacaaagccaaggacttggagtgtggacccaaccccacagcatgcaaaaccgtggggctctcaggattccaagcctagcatccccaccctctcataggcgcttcggagctgaccgcaggcacacttttaatttgtggcaagatggtctgacaaacagcttgggaggacagcagaggtgaaaatacagatcaagtgcagataaaaatatgttcaccttgaaaaatacaaacaagacttttaggtaataatgcacagggaaatacctatcaaaaaatgagaagaatagaaccactgctttctcattaacagttttcacaatcccttttagcttgtattccaacttctgtccataatccaatatctgcatactccttacatctatacttaaataatatagatttttgtcccctgtacatatcttataaatgtcaatccatcccacctcaaagtttcttggtattcagcaagttttttaaaaagtcaatcatgtaggagatcctttagcaatacttcaaggtattatccctataaaaagtgaagagggatctgaggtcctaaaaagaaaaataatgacagagaatggctgtaatttcatatgttcctgatggaaatctcactgctcagaaaaaaaaagaacacatatgccaaaataaaagaaaaaaaaaa

SEQ ID NO: 1452 - DNA, 1190 bp, Homo sapiens
cgcatgggcagggaaagtgttttattgttatggactaataatttagaggctagggaaggaatggccttgtgtgctggcctcgttgtaacaatttttctcatgtgtcttccagcctgttcatctgtcgcgtttatttctaaaaagtcctctcacctgccctctgctgtcctcagatcccatccacggccctcacctccctcatccttctctgtaacctctgacaattctggatgacctggtccccgccatgcactttgggcttgcccctgccctgtgagtagcctgacaaccctgcacacacccctggggtggtgccagtgcctgctcctcctcctggcctccctgccacccagcccggcatgaagctgaacatcgagtgggccccaggagagaggctgagttggtatggccaggactctcccttggcccagtgggaaggtgcacctgcccacttgggagcaggcctcagcacccctcaccagtttcaggttgcccactctcaacagcagctaagtcagagctccgagggctgctccccacccaccttcagcctcccaggcctccccttgcccgcctgggccctggagacacatgcttcagccacaggcaagtctgtttcccttccatggggttttctccacaccacagcagtggtacctctgggcttctctccctggcccctgccccaaggagcccagatccagtgtggtgcttcttagactgtggtctgaggcctcctgcttatagaacaggcagattcccagacattgcctctcccctaaccaaagtttattgattctgagtctctagggctgtggcctatatttgcatttttaacaatctccctcgggactttttatgcactgagatttgaggccagggttgttctaggctgtaccggcaggtggactggaggccacagagaagaggcagagtgaaattgtgccgggcctggcttggagcacccaccagcccccggaagacaagtctcacccagagctctccggttaagcctgccgagagagaggcaccaggaggcaatctccacactctcagacaccagccgtacccaaagattgatgatttcagacaccgggcctcccggccacatcctcactgcctcactcacgcgtcacaccatagctcttggtttatgtgtttgtctcctggttacacgtgtgttcctcgag

SEQ ID NO: 1453 - DNA, 432 bp, Homo sapiens
ccctgctgtttgttccagctcagacctatatgttttgtccatttcacgctccacctcctgctctccccagattgtttcctgtaggttttgtttttgcatctgcccctgccaaagtatgtgggttgacgtggaagacctgaacactctgggagcctttgaagcaaggatggatttattcctttcaggccacagacgccatgccgaggccctggttcccctccagacctgtgcgaggtcctgagcatggcccagtgcatgctaaaatccccacccacacacagaggctgcggatccatccccgaacttcaggggcagcttctgaagtccaggccacctagaaccagggtccctagctccccttctggaacccaatcccctacatggcccaggacccaagcaaggcagggagagtgcgccgtgagtcagcagcag

SEQ ID NO: 1454 - DNA, 12473 bp, Homo sapiens
tgctgggactgctatgcatgaccttggagcactccatttgttcatcccacgagccggacagcacgtaatgggccttgccctggctgtcactcaccactcctgtcacctgtggacattggcaggaccagcgtaggtgcagactctgccctgggccccctggggtgcttagaggtggctggtcctgcttaccttccgggctgcctctttggagaagtagctgtagggcaggaacttcagctggcaccggtcattggtcttatggttcacaatctcgatgtcccctgactggcgaaggagggcagtggtcagcggccagcccccgggccatgcaccccctccccaagggcgcccctgacctggtcgatccagagcttgcccacgatgatgttgtgaacagttgaggtgctcttcctccacacgtagtgattcccactggcctggaattctaagtggatggcacctggaggcaggggacaggtcagaggtcatgcccccccatgcagggctctggccagtctgcccttaggcctggtgtcttgagaactaggctggggggttgaagaggcaggcctacagggaggtctcccttggaagcccccagctggcttttgcatcaccagaatcctccctcttatgcacaatgtctctgtgtcccaggaaggcaccgggccccagctcacctagcggcatgatggagatgtattttccccggaacttgctggagatggtgatctcctgccagaggctccagccatgcttggagaacacgtagtgcgcagctgagggggggtggtggctcacctgagaccagacccataggatgtgagcatctgccagacatgagcccaggttccacttgccccagccagggagggacagcttgccctgcctcagcaggcacagctctgtggccataggagcagtcctggctgttcctcaggtggccatggacccaaggcaggcccccaggaaggcactgccttgagcagaaaagcatccgggtgctgtcctgagcctctcagtgcctggctcctgggctgtgaaataggggtgatggtggacctcatgctcaaagacatgtctgtgacaggtgcactgagggctgataaagggtgtcacactatgccgaaggttccatgtccacttctcatctaatcctccccacacaccaggtgtgtctgctgtgccatgttataccaagggggcccagactggcagagtgattttagccaaggggcagtcgggccctgcctctggccagcctggctccagagcaggcatccacatcgatgcactgccccgggcccggccctcccctgccttgctggcagttccaccaagcctcccttgtctgttcttccttattccatgctgctctggctgtggggcccaggcttccctctcctaagtctacccactccccaggacagcagccctagcctagccctgcccctggcctccagctgcccttggacatctcatctcccctcagacaggcagagccgggatcccgctgcccgcagtgtgcctcgcctcacttcctgtctctgtaagaggtgcccacttgcttcctatgccccaggagatgggttagctggccctgagctcagctgatccctccccaaggagcccataggaagctctgcctcctcctcgcctatacctcagcatcctgcccttccagctgctcacaccaaacgctctgcagcctctctggccctcctcatgctcctcctctaaccctaagcaaacccttcctgcccttccttcaaatcgcatccagcatctgccccctccactcccacctccatctccccaggcttccctgtgggccactccctccatcgcagtggagggttcctctggcaggtcaggaggcaggccccacccggggtgcaccgccctccagctgctgcttcttcaccctcctttcctttcctcccctcactctttctgcatcagcaaagctgctccctgaccaccccctttctaaaagagctggaagcagccacagtatctgccttgctttcccagccccatgagaaccagagccgtgtctgttcacttcccagctgaaacctccatgtctgagcagcacctggcatgtcgagggcacctaatgtctgctaagtggagaaatacattcactccagggttcaggccaaggacccaagatcaccctgactgccccccacccccgtatccaaagcgtcggcaaaccagctggctcatccttcaaaagctgcctgtgttctggcctcccccttcccccaggtctggccaccacacccctgcgtgtgtcactgcagccacctcctaacggggccttgcagcagctgcagcctcttcaactagcagcagggtctgtgaatggccagcatcccacactcatgccaggagccagggcaacgccagcaccaacagaatcacctcgtttccaaccaggacgcccaggttcagcatggggctgccactgctgaggctcctgggcctgggtcttggcatatctctgtggggaaggggtggtggggacaggctgctgtcactggctggggcagagtccatcccaccgcacccaggctcctcctgccagccgccttcagctcggtagtgaccccatgctcctccccagcagtgcccacagatgcccctccacctctgctccacaacaccctggactggagcttatcctcccgctccctgcaaccaggcctgaccttgtcctcaccaagctgagttctcatgcccctcgccatctccaggaggccgtgtgcctgcccctgccatggaaggccctgctccctggctggacctcagcttgatggccccttgggtatgggcagtcagggtcagacagacgctgcctcccatttgtcaccttgggcctggcaggaacagcttggccagagtgtgggtgggcgccacccagtgccagcctagccccctcacctgctcacagagggagcgcaggcccatgtcgtcgaggcggtccagctcgaaggtctcccccagcatggggttgaagggcttggcgatgcggtgcactgtggtggagtaggaggacacagagaaggcggccaccaggcacatctgctccactgagctggtgcagtgcactgccttgtccagcaggtggtggtactccaggtcctctgtcagccgctggagcatggacaggggctcattgaagttcacctgtgggtggacaggtgggtggtcaggctgggcaccagccccggcttggcatggtgcccttgcttttctcggatgttcagggacatccctgctcagacagcaccttcacagtgaggctcctcagatggccctgtccaacagtgtggcccccaagccatcacctccctggcccctcctggctgttttctccacagcccttcccactttctggtctgctgcatcctacacacttttatcatgttcactgttgctctcctctgctcggatggacacccaccaaggccaggggttctgcctggcccactgctgtatcttgagtgcagaatcttaggaagcagtgactgaatgggcacatgagtctgtgggtggaggaagtgggtcttccccatgttgcgagctgtgatggggcccggcacaggatgggttaggcccaaggcccctatctcggtgtcacatagggcagggtcactctccccaccatgatgccatcgggtacgagtctcagcttcctcgtgttatcttgctccatcctcccagacactgaagaggacgctgtgtttctccccaccctacacatgtggacacagaggctggagatgtgaaggaacttgttctgggtcacacagcagaaccgtctggcctagtggagatgccactgtagccaggtggcatgaggatccaagctctgagcctgcatttcctggggatggcaccagggatggctgccagctgaaggagggcccacccctccacacacagccccatcctgccactccccatctacagatcgggacagctgggacatggtaaggtcctgtgagatccagaggtgctctggggctccccaggttgctgatccatgcagagcttctccctggctcctcctgtcagagcccaaagatccctgtactttggaagattgggcaatgcctatgtgcacgattagataattagttacatgctcctcaggtgccgttaagaaaatgacactccaaggctgtgtgtacttcacacaggccattactgctcatccacgcacaggaaagcagccccagaggacctgtcggggctgccctgcccgagccacccaccggcatggggatcctggagagctcccggccgatgcagttcttcatgatgctccagaggttaaggctgtagttgggcttgttgggaatgcggactcgcctcttgactttggatgaacccttgggcacgagcgaggcaccatctagtacctgccacataagtggggaccccctcaccgtcagcagaggccagagcgcccccttggcttccaagtttctgccctccaccctgaggactggcaccaagccggccactggtacgctgctggtggaaggccaggatggtgctcctggactggggcatgggcctgcctgctggcccccagttcttggtgctggcctgtccctcccaccccctaggccagaagctgccttctggcccttacagtgctccccctcacttacattgtctgctgagctccagtccacggaacttgtcccggtgctaccttcagcttttctgctggaaatacaaagcgggaggcaagttactaatgaatcccgaggtctccttgggacctggcccatcctctctccagacaacatcattttcattgctagtaaatgtcctggtcactgccgtgtgttctgtgtgtagacaggcaccgcaataacaacatttcaagggtggatagtgtatatgacagtggtcccataagactatcatatcgtatttttaatataccttttctatgtttagatacacaaatccttaaccattgtgtcacaattgcctacaatattcagtacagtcacatgttgtacaggtttgtagcccaggagctataggctgtgccatatagcccaggtgtgtggcaggctctatcagctaggtttgtgtaagtatactctatgaggctcacacaacaatgaaatcccatctggagcaagaccgatagattattgattttttgagacagggtctctctgttgcccaggctagagtgcagtggcatgaccatggctcactgcagcctccacctccctgggctcaagcgaccctcccacttcagcctcccaagtagctgggactacaggcctgcactaccatgcctggctagtttttgtattttttgtagagacagggtttcgccatgttgcccaggctggtctcaaactcttgtattcaagcaatcttcttacccttggcctcccaaagtgctgggagccactgggcctggccaaagcaagatttaaaggaaagaaaaccccaagtagacaactagatagctggtgaaaagaccagatgcagcctaagaccagggtgggggaggctctgcccagctgcagccaccttacctgtcttccttggcctcggtgatcacggtgatgaaggatgtggagtcttccatggcatcaaagtactcggtatcttcatcttcctcactgtcctctcctttgggagtcaagaggcttcctagagacacagacagagctttaatttgtaacctcacaaaaggctcaatctcgcctccctaagtccagagccaagggctcccccaacccccatctggcctcactcccctcctgcttcagtcacctgggcagccctgattccctgggctgcggccacccttgctccctctgctagaatcatgtgctttcaacgcattcaccgcacaggagcctctttctggaagcccccccgatctctcaacatgtgggtcagtctttctgtggcccagcttccctttctgatggacccctgtccagggtccccatgacccccaacccaaggctaggtgggtggccacctggcaccaggacacccctgtcacacaggggacagctgggctcattaaatttaactcttgagaatgtgaacctaggtgcagacaaactgttgccagtgggtgatggacatgggagatacaaaaccacgaagaggcagtcaagagttggccaaggccagcccacatgtgggcacagccagggatgtgcatgtgggggcgcagaagttgtgtatgcagagccagctggcagaaggtcatgggacagccctgccctggctgcccactcaccctcaatgaagctcttggaggggttggccggccggccaggggcactgtggaaggcccgctcgaggctgttgtgctgcttcgccagctgctcaatggtttcctccaagtgcacgcgctgctcctgctcatactgcagtgcccgctgccatttccgactgtgtatctctgctagttccaagaagtccctgcaggcctggggagggaggagtggcggtatgagaccctggcctctggcaggggcccatctgtcagaggcatgtgaaccagagcaactccaccttaaacaggagctgggtaagatgaggctgaaacctactgggctgcattcccagacagctaaggcattctaagtcacaggatgagatacaaaatacaggtcataaagaccttgctgataaaacaggttgcagtaaaggagccggccaaaacccatcaaaaccaaaatggcgacgagagtgacctctggtcgtcctcactgctacactcccaccagcgccacagttcacagatgccatggcaacatcaggaagtcatcctctatggtctaaaaaggggaggcatgaataatccaccccttgtttagcatatcagcaagaaataaccataaaaatgggcaacaagcagccccgggggctgctctatctatggagtagccattcttttattcctttactttcttgataaacttgctctcactttgcacagcagactcgccttgaattctttcttgtgtgagatccaagaaccctctcgtggggtctggatcaggacccctttcctataacacatctgctcccccacctccattccctgtgaggactaagctctgatattttttatcttgcccaaattcctatctaaggcgtctggggagtcatgccctaaaaaccatacattctcatcagatgggctttatttagccctatatatcgtgacttactttccaacctgactctggcataacattacgagtcaaggaagaaaaagtatttcatcccaaaacatgcttctttgccatattttgaagtggccctgcaaagctgtcctttgtgggggaaaacgtgcatctgtaaagaatctctattcacagagctagatcgttttcttccaggccctcccaaccctgaagagatgaagtaagagtcttagcacctttttaaaggtctgattaggaaacatttgtcatctattgtctccaaggggagccactataagacttaaaaagaaccttggtctccacaatctttcatcttaacctgaacatttcctttctattgatcccaggtctttagacaactcaaccaagtgccaaccagaaaatgtttaaatttacctatagcctggaaggccccctccccaccttgcttttgagctgtcccgcctttctgaaccaaaccaatgtatttcttaaatgtatttgattgctgcctcatgcctccctaaaatatataaaaccaagctgcgccccaaccaccttgggcacatgttctcaggacctcccaagagctatgtcatggctgtggtcactcatatttggctgagaataaatctcttcaaatattttgcagagtctgtttttgttgacacctgcagtgaagaaggccctgggggccatctagctgccccctctgctgggatggtcacaaacatgcttactgccccctttggcctccttggggatgtgggaaccctggccttctcagagcccgcccagcaaccagcacccaccttggttggcctcccacggtcaggatgccagttggggaacagcaaacctgggtgccacgggtctgcacgctgcctccccagcagcagctggtttggttcagcctggagctgaggtggctgctgttgctcattatggtagggcccgagcattctgcggccacgtcctccctgcagtgttaggcctcaggtttgtcactggcccttgtctaccctgggccagtccctggccgtggcacagaaggaaggaaagccacgttctgctatcctccccagctcagagaggtaattggtcttgtctggcagaagtgggactggcactttctaccaagctacatcagagtctgaatcacataactgcttttaaggttttcccttcaagcttgtggcctactgagacatccagaatcttttcagcttcccaggtccacagatggttccaccaccagttttgaagcaggggttggtcattctgccctgtcattacagtggagaggatggctcaggcttcagctgtccctggagggcagtgagatcaaatctaggaacctctggatttgccctttctggacacattcttgaagccagtaggaagggacgtttccttggcccgcatctgcatcagtggccccagctgccactccccagcacttcctccccacccaattgccccagctgacctggagcacccactgagctccatgcacatcacaggctgtcccaccccaaaggaggaagatgggcacaccagtcctcacctgtgacacagggacaaggcagctgttgaggaaatatcaggaggtgatgtggcaggcagggcgagggagcactcaacagacgtgcctcatggatcccctcccgcatctgccctggcacctggtgcccaggccacaaccactaactcccaccactcctcagacctctgcagcatcgctctcccaggcaacggcctgcccctcagtcagaaccgctcagatgcctgcccattgggtcggtctctccagcgactgtgccaggaatgcccctgaatcagcagctgctcccagacatttgctgccaagtgacacctaccggggggtgggactgacagcagtgggagcgagacgggggtgtcctgaggcggcctcaggagaacacctccaagggtgggaggctccccaaggctgtgcactggggcaccctgcctggggactcgcccaccccacagggagagcccgagctctcgtggctggcctggctcggtggaaaggggcccccagcctgccccagggatgccactccttgaacaagccctcctctgggcaccttccctcccccatctccctcaagcaccacacagggtgggcagggcaaggtgtgcctcctcatcccagagatgtgaaatggggcctggagatgcaacatggcctgcccaaggaagccagcagagtgtggtggccaggggtgcactatcaggagttggaaaacctgggttccagcagaagccccttggaccctctgagcccacatcctctctgtgagacagacggtgatgcccgacagatgctgtgcccacaagctgccctgtctccgctcatccggcaaaattctccaggtgggaggagtgcagtcacccccattggacagatgaaggtctcctccctgcaggttgaggcagggggaaaggcctcctcgaggaaagaaagaaacctccttatctcatgcgcctcatcctgatgatgtgtgagactgagtccagggtgttgaaggtctgggctattttgagttcatgggtcttataaggctgtcccttgggtgtgggactgcagtcactgtccatcatacaatttgcagaccccatagtgggcctgggtgagtcctgggagacgcagctccaggcctgactccactgctccctggcttgtgactgggagccgagcctttcaccacctggagtcctacagcggccgtcctgcttcacccacaaccctgtccctctctcactgctgtaggccttagagtgaggaccctgaaaacagactcagagacaatgtgccccagcagccagaccagatggcacctctttgctggttttgtgccagtgggtgtaagggcggtggcggaggcagggggacggtatccctctgggtgcctcaggaatgttccagacccttacagaagccccatgagttgggtagacagagactcccaccccatcccaagacagcaaagctagccctgagggcacccagcaaggaggtggcagagccagatccagaacccaggtcctcaactgagagcttgctctaacatcctacctggctgcagctcccaggaggccctcctccccacattgccctaagcttggcccagtgctctgtcaagttagtcttggttccagccacctgttcatgggctctctgacactgctgctctgctgaccctggcccatgcaggtctccaggctctgctgagctggtctcaaggctcagagtgcaagtgaggaaggacaccctcatctccctgggtgctgcttcagggaagtcccctgcatcccgggactgggagaaggggctaatcgggtcagtacagggtgaacaggatgggatcccaggtctgtctagccccagggccacctccacacaaggcacgatccccttgcctgcctgatgcaagtaggggtgcagaggccagggctgtgctgtgcatggtgagagtgaattggtgcttcatggttttctgggttcttgcctatctggctgcacaaggcctctgccccgccctccctcatccctgcaccatcacttcctgccagtctcctacagcccccagaatcatcctctccatccacaagttctcacatagatgggtgctttgttttcatatacctcatgtcatttacaagacttatgaaagagccatacaacagcagtttaaaatagtagccaaaggtcatggtaagaattcccacaaactcacatctgagggtgcctgggcttcccagcagcaaaagcaaagagggaaagatgaccagagaacaaagatgaattaggccccctacctcctacctttgctgttcacagggactctaatactttagaaatgactattttctccttcaagggaaaatggagtatttgttttttccacagatccgggcagctgatagcctctcatagaaaatggtttccaatcctctccagcctcatctcctggggctccgttccttcccagggccctgagtgtggcccaccaggtatcctgtcttcttgcctttccctggctcaaattcaaaccctcctgctgattctgatgccagccccacctccctcacaccgcgggcccactgtggggcagggcattgcaggcattcttacaagcactgaggtagattttttttttttttttatagtgtgcatgaccgaggaggaaatgaaggctcagggtgactgagggactcgcccaaggccacaaggaggtgtgtgtagggccaggatccaagtccctgagcatctcacctgcatgtcccccagggtatggaaccagtgctgttagggtttactttgtaaagccaaatcttgattgccgtctgggagccccttgagggcagggatgttgtgggatcccagagccttcctggtgtggagctaggttcctgggagatattcactaaccaggctgcctgggaataaccctgtccaagcaacagagcccagccctagcctcagggagaaggggtggcctcccagcacccttagccccagctgaggactttgtacacacagccagggttgctggctgatacactggccgtgagtgacctcagtccccctcaaggctaccaaagggccagctggcatcgtgcagcagggagacaggaagtccctaggacagctgggcctcatttgggtacatgtgcctaggctgggcacatgcaggtcgtagagtgtcacagtcacctaaaagcggggcagggtgaaaactgctgtgccctaatatcaaaggcctcatgtggctgcacccaagacctttacccccacagcacatgagctgcctggtcaccccatggatgcagagagcccgtccacctcccccagcccggatgcacccacctggtgtccatccctgactcccagggtctcctctgctgctgccggccttctccaggccccatcctggctgtgctgtggggagaggcaggcgcctggcgtggccctgctgttctcagaatgctgagctgggctgtgtgctgtgtgcttgataagctggattaggcttggggcccggcagagggactggcagggggaggttcccaggggcccagggagggcctggctgacccagcccaggcctgaacgtggtctcatttctctgaggctgtgtgacaactctacctggggccaggagactcgtgctcagctgtgagcaggaggagagacgggctgacctgaagccccctacccgc

SEQ ID NO: 1455 - DNA, 976 bp, Homo sapiens
tatccttgactaaaatcttttgctcctccctggaagctattagaattttttcttcggtcttcattttgactatagcatgatctagatgaacatttttctttatttcttgtcttcagcacgctataggccctttcagtacagggtctttcatctctttgcttttactttgggaaatttatcttcattttatctccctctttgttttttttcttcttcttcttctttccttctgggattccagctaaatgggttattttagcggttaccctaggaatcgcaataaacatacttcatacactcagaagcgaatgtgcatcttgatcctcttccagggcagcatggcgggggggcctttgagcagtttccctcccttcattcctcttcgtactgtgcagccacattctaaaatgttgtaccccacgttattcttgtttattcagctttaatttaggtgcacagtatccgttattctcagatcttccctctggggtcagtttcctcctgcctgaggtatatccttttgtgcaggtctgctggtgccaaagtaagctttttgtttgcctgaaaatgccttgatttcaccttcattctttaaagatggtctccctgggtgtataattctaggctggcagtgcatctttcaactcacggaagatatcatttgactgtcttcaagctcccatttctgttgataaggggacagctcctcggaaagtgatgtctttttaaaatctggctgcttaatagtttctctctgatttagtttcactgcatagatttaggtgcaggaatttctttgttatttttatcttcaggtacagtccctctttccttttgggactctcgctagaaatgccaaaccctgctctcaatcttgctgagcaagcttacagaaatgcagattccattgcaggaggtctgacgggagactgcactcaaactcgctcccaggagaggccagggagcctgctccagg

SEQ ID NO: 1456 - DNA, 1099 bp, Homo sapiens
gagccaccaccccagcccattatctctattgatcctcactccaaccttgcaaaataggtagcgtattccagtggagaaactgaggcacaaagaggtgaaagacctttcctgtcacagttaggaaagtggcagaagccgtatttgaaccccagcaggtctccctctgaagtccacacacgtcagcgcctctgtgttgtctctttgccagcacagggctccctggagcccagagatgggggtggtgacttgaaggggttggcaagcctgggctcctccagcgaagcattcccttggccctgggcattcctaagcgagaagaggctcaatcctattttcttctcctaattggatgccttttattcctccttcctaattgaagtctggtcattgctggttgccatggcagcagccaaagcgctcatctcactgtggcttgtctctgcctgcggccaatgggaaacctcctttcccatatacggtggggacatggagtgtcaggctgtcgtattctggtggctggaggaggagaggaagtgagatgggaggaaaaaggcctgtcctctcccacgcagagactccggacagcaggatgtgtggaatccccagtctgttttcagccaggcagcaacagcatctgtactgagttgagtctatgtgtctaccagtgggctaagaacttcatgtgcagtatctcatttaatcttcgtgatggccccaggaagataagggatcaaggcccagaaaggctaagtaagctgccaggtcatccaaggagaaaatggcaaagcctggatttgaacagagactccagcttccttatgtgtagccatctcaccatgctacttctcagggggttactatgagtgtctctcatgtccccagacccagattacaggtttggaggaatacacagcccaccttcccaatatcgcaggcaacagttccaccaaatgccctgcatggcatcacagggagcctagttgcccactgctctactgctgagctcaatgccacccagcccgggctctctcgagctagcctgcttctcaggccccactgacgtcccatggttcaccattacaaccgttcccttgcctcc

SEQ ID NO: 1457 - DNA, 1181 bp, Homo sapiens
gaaagcaggctcatttggggactgattccaagcagggttctgaagaaagagctagcccactgcgcagtggcccacctggagaggtagcagtctcctttcctgatgccagatccaagcagaggctaatgctggagaccagcgatgcccgtgggagaatccctgtagctagagggaattatctggaagtaatttatccctgtaccgccttgtggggttgggtgtttcttgcccactgcatgagttggtattactctaagagcgacagatacatgttttcacatgctttccatgtactagacactttctaggcatcagttctcaacatgacaaagagatccttctcagggaaatcagatccctcttccactgctgaaaaaccccacagtggctcccatttcacttggcataaacaccagtggccttgcagtggctgccaaggtcaaaccatctgcctttctgcttcctgctcacccttttccttcatcttctcatcttttctgtcttctccatagctcacactcccctagccacactgttctccttcctacaatgcagcacactgggcatgcttctaccccagggcccttgcaccagccgcaccatctggttgacatgcttctcccacagatacttgcttggctaactccgttgtgctctggtttttgtcaagcagtcaccttctccatgaggcccacctgggccaccatatttaacactgcagtctacactgcctctcctcccaccacccagcactcccaggccctcactctgcttcctttattttttccatttcgccagccatcttccaacacatgggaccacatccttatttattgagtgtcttgttgcaggtctctaagactgtgcctgccttgttcactgatgtatctctagcgcctacaacagggtcgggcacagagtaggagctcagtaaatacttgtggaatgaatgaatgagctcattttacctcaatcacaactccaggggtagacatggtgatttcactccattttatggttgaagctcagaagcttacggaacttgcccaaggtcacatagttagtaagtggctgagtgacgcatcaacccaaagcctgtcttactctggggtcctggatcttaaccaaaacactaagctcttccctcctccaggtgagcccctggtcctgatgcctcgagt

SEQ ID NO: 1458 - DNA, 869 bp, Homo sapiens
tgctctcgccacaggtctttctttttcaaaagcaaacagctacagtatccatcatactccagagcagccctcaaagcctgggctgttgagagtgcacatcctggcctgcggtgacagccgtcagatggtgaggggccccaggcgactgccccagcagcagggcctgggagctgcacaggggagaactcgataaggagcatcatgagcatagtgggtccattgacaacatgcagtccccacggtggtgcctaatgacaaaatgacatcatgccacctgcaaaaaaagtaaaaatgatcagaggcgagcttgtcagagaagctttgaactaggtgactgcatgaaacatctcagaggcggaagagtgcctccccctccccgggactcccacctggtgccctgagctcatcatcccttctcttgtagcatatgctgtcaatacccagggccttttcgaaacggcaatgggtccgaaggcctcgggaccacctttcacacctcccctttatgcagtgtccatacctccttggtgctcagctgctggtcagctccatgtgccctgtggtccctgccctcccaaggcctgtgaacaaatgcttagtcccagattagagtctacgtcaatctgggatgtgagctgagtggcacctgtcgtgaaccaggccagagtctacgcaatctggggtgtgagctgagtggcacctgtcgtgaacgtgcatgcacatgggcattttgtcagtctgcaccggtgaataaatgtcgctgcatttgccagctgagtgtcaccaggttccaggtcccattacacatcaggaattgtgtccgactcttctggatccgctgattggacctgagggatccctgactcgag

SEQ ID NO: 1459 - DNA, 851 bp, Homo sapiens
gtctttcttttcaaaagcgaacagtcagtatccatcatactccagagcagccctcaaagcctgggctgttgagagtgcacatcctggcctgcggtgacagccgtcagatggtgaggggccccaggcgactgccccagcagcagggcctggcacctgcacagggtagaactcgataaggagcatcatgagcatacccccccattgacaacatgcagtccccacggtggtgcctaatgacaaaatgacatcatgccacctgcaaaaaaagtaaaaatgatcagaggcgagcttgtcagagaagctttgaactaggtgactgcatgaaacatctcagaggcggaagagtgcctccccctccccgggactcccacctggtgccctgagctcatcatcccttctcttgtagcatatgctgtcaatacccagggccttttcgaaacggcaatgggtccgaaggcctcgggaccacctttcacacctcccctttatgcagtgtccatacctccttggtgctcagctgctggtcagctccatatgccctgtggtccctgccctcccaaggcctgtgaacaaatgcttagtcccagattagagtctacgtcaatctgggatgtgagctgagtggcacctgtcgtgaaccaggccagagtctacgcaatctggggtgtgagctgagtggcacctgtcgtgaacgtgcatgcacatgggcattttgtcagtctgcaccggtgaataaatgtcgctgcatttgccagctgagtgtcaccaggttccaggtcccattacacatcaggaattgtgtccgactcttctggatccgctgattggacctgagggatccctgactcgag

SEQ ID NO: 1460 - DNA, 1472 bp, Homo sapiens
tagtttaaaatacaatttaataagaaaatccgggatacattttatatgattccatttattaaagaaaaagaaacttctttccaatatattctacccaattattaaattcattttagatttttgggaagagcaaatccaacttaaaaaaaaaacttgctaggcagttgaaatcctctggttccaaagttttaaaaaatgaggcaagattgtatagtgagagtagaaaaaataagatgaagtggaatcacccatgacaatttgtcatatttgtcattacgaatttcaacatctgcaactgaaaagctacagaaatcaaaaaataaaacacaaagaagattctcaaggaccaaagactgtttgatgatgttgctctaagattttgtcctccatttatttcacacaaaaataagttaagtataaataagaagatgaggagagctggtatgtactcagatgtgttcactggtgcatagtcagagggggtgtgagaacagccaaatgtatttcttcgcccacactcactacacaaaactctcctccatgttgctgcagagtaagaaggagtccaccagccgaggctggaccaactgctgaaagtcagagtcctggaggccttcagggcagaccccagccaatctacgcagagcagcctggggagaagacagaagaggtgacacgtgtcagactgggccatgtcaggtacatgtatttccttcacctaccctgaaatgtgcatttcagaaagtggtgcatttaccagacaatttgggttgatcatcatgttagccacttggcatctcagtcaccatcttggtcacctggtcaacatagcaaccacatctcttggtcagctagctttatttgcaccttgatcactaagatagatgtcatctgaaagctgttaataatcttaataatggtctttattatttccagatccctagagtaaccttagaacagcaagaactattcattcatccataaattcagcaaggtgctatagaaagcactatggaaaaaagaggaaaagagagggagaacatattgtaaaagtagacagggattctgctactgagaaattcaacacctggcaagggggatgaacaggaaagagaggtgctggcagaataaaatcactccccagctccccacacaatgagcaatgagtatgctatttctattttgtgtccatgtgtccttgctcatattcttaatcttcagcccaatgctctacctctgagctataccccctcctccttgctcatactcttacttgtgacttgaagtgacttcctgctcctgcctattgtcacctcccccatgaaggcttccccaattatcctgaagcagagacagtccatccctccctcccctgtgcaaccagggcccctgggctgacctcaagcttctcacacttggccataactagcttttaggtatttatctcccacactagactctgagctcctcga

SEQ ID NO: 1461 - DNA, 898 bp, Homo sapiens
ccagaagagggattgctgggtcatatggtagtttaatttttttcagcaatctttgtattgttttccataatggctacaccaatttacattctcattaacagtgcaaaagggtttttgtttctctataccttgccaacttgttatctattgactttttgataataggctttgcatttgcctgatgattaatgatattgaacacattttcatatacctgttggccactttttatgtcttcttttgggaaatgtttgtttattctggtacttggcctattttttaattgggtttttgtttttttctttttgctattgattttcttaaatttttggatagtaacctgttatcagatatgtggttcacaaatattttctcctaatctgtagattgcctttccattttattgattatttcctttgctctgtagaagcttttcagtgtgatgtagtcctacttgtttgttcttgctttcattgcctgtcctatcagaaaaatcattgccaaggccaatatgtatcagcttctttcctatgttttctcctaggtgttttacagattcaagtcttatgtttaggtctttaatctgttttgagttgacttttgctcttggtgtaagataagggtccattttcatccttttgcatgtggatatccagttttcccaacactagatatgaaagagactaaactttacccattgtgtcttcttggtgcctttgtctaagacacttctatgacagttgtttctcagatgggtacttgtttacgtgattcacaacagtgaatggaaatgtttaccactcatcactccatctaacacaccttgttaagacacatgtaaaaactgttctaatagtaccagttgcaactataactgaaaatagtattattttagtaa

SEQ ID NO: 1462 - DNA, 306 bp, Homo sapiens
ttctttttttttttttcttttttttgagacggagtctcactctgtcgcccaggctggagtgcagtggtgtgatctcggctcactacaagctccacctcctaggttcacgccattctcctgcctcagcctcccgagtagctgggaccacaggcgcccgccaccacgcccagctaattttttgtatttttagtagagacgtggtttcgccatgttagccaggatggtctcaatctcttgacctcgtgatccacccgcctcagcctcccaaagtgctgggattacaggcatgagccaaggcacccggcc

SEQ ID NO: 1463 - DNA, 886 bp, Homo sapiens
cacgggaggcagaggttgcaatgagtcgagatcgtgccattgcactccagcctgggcagcagagcgagactccggctcaaaataataataataaattagagatggggtctcactattttgcccaggctggttttgaactcctgagctcaagggatcctctcgcctcagcctcccaaagcactgggatcacaggtgtgaggtgccatgcctggcccacaccagctgtgtttaatcaatgctgggcagccctgcagcttggtgacatcagtgggccactggctactgggtgttttttccatcctgccctgttccctgctggcaccaggggaaaaaggcccatacaggagtctgttccaggtcaccagatcctggggtggcccgtaaggatttgaaggggacaggaggcgcccctttgccgaggcccttcactgtgtcaggcacattgctggctgccgtgggtgcacaatcttagggaaccctcctgcctcctccgccttgctgcttccttgcaaagaaaatttcccactgcagagggcagcttaattgctcagcagtggctcttcagaatctcacagatgggccaggcgtggtggctcatgcctgtaatcccagcactttgggaggccgaggcgggcagatcatgaggtcaggacatcgagaccatcctggctaacatggtgaaaccccatgtctactaaaaatacaaaaaaattagccaggcgtggtggtgggtgcctgtagttccagctactctggaggctgaggcaggaggatcacttgagcccaggaggctgaggttgcagtgagctgtgactgcaccactgcactccagcctgggcaacagagcaagaccctatctcaaaaaaaaaaaaaaaaaaaaaaaaac

SEQ ID NO: 1464 - DNA, 103 bp, Homo sapiens
gaatggtgggaacctgggaggtggagtttgcagtgagccgagatcgcgccactgcactccagcctgggcgacagagcgagactccgtctcaaaaaaaaaaaaa

SEQ ID NO: 1465 - DNA, 11168 bp, Homo sapiens
cagactgacgacaacagtggagacttggacccaggagtcttgctgacagctcaaactatcacatctgagaccccaagcagcaccaccacaactcaaattaccaaggtaacagaccagctagaacctctttatggaacccaggggcaggctaagcttgctgccacctctctgcaagaaggaccctagtccataagcaaatattttcagctccatccctagtaagccacattattcaaagagtcctggatggaaaggccctgctgccttccccagcaataaatctagggagataccctgagagtatccctgcctacttagtagtctcctaaaggtaggtgtggttgttctctttacacatctgtctctctggtcagtgagtcccctgtctggctgtggaagtaagtttaaaaagtcagcatggccaggcatggtggcccacacctgtaatcccagcactttgggaggccaaggcaggtggatcacctgagatcaggagtacgagactagcctgaccaacatggtaaaaccccgtctctactaagaatacataaattagccgggtgtggcggcatacacctgtagtcccagctattcgggaggctgagggaggagaattgcttgaaaccaggaagcagagattacagtgagcagagattgcgccactgcactccagcctgggtgagcgagcagactctatctcaatagaaagttaacttaaggggccaggcgtggtgtaatcacacctgtaatcccagtactttgggaggctgagacaggtggatccctttagcccaggagtttgagattagccttggcaacatagtgaaacctcatctgtacaaaaaaatacaaaaaaaaaaaaaatgtgctgggcataatggcgcatgcctgtggtcccagctacttgggaggctgaggtgggaggatcacttgagcccagggcatcaaggctgcagtaagccgtgatcatgccactgcactccagcctgagtgacagagcaagaccctaaaacctatctctgtaaaaacaaaacaaaacaaaaagtcagcttcagggaaattatttttggtatttttatacaaccatattttccaagcccaaaatcagaactctgggtctgaggaagaatttttacagcattccagggacaaggccatgagaacttgtttggatgctgaaatattggaattattagaatgtagtttataggaagcaagagagagaaaatatctaaaattggaactacccccagaaaatcagaggcaatcgatgtttgctgtaacactagaggaaaatactttttttaataggtaagaaatatagcttcttgaccaagctctctcatcaatacacagatgactggaaactagttaacttaatgtgtctagaccttggttttcctcatctaccagaaagagaaatctactcaccctcaggagattatgtgaggaccttttgacatcaataatatgaaaatgctttaaaatacaagagcccagtttcaagctgtgtgacatatttgttcatagccttcagatttttttcctcttgaaaatgatcatggtggctcatgcctgtaatcccaacactttgggaggccaaggcgggcggatcacctgagatcaggagttcaagaccagcctggccaacatggcgaaaccccatctctactaaaaaaataaaaattagccgagcatggtggcacacgcctatagtcccagctactcgggaggcttaggcaggagaatcacttgaacccaagaggcggaggttgcagtgagctaagatcatgccactgcactctagcctgagcaacagagcaagactccatctcaaaaaaaaaaaaagaaaaagaaaatgatcaattaaaatgtatagcatcagtatccagtctctaaaacagaaatgtatgagagaagagcacagaaagtcctattttgtttacttgctagatttctgtggtattcaggaggaagaaaaaggagaaagtaaatacagaattgtgactttctgtttagcttaataaagattttagtaatccaggctgggcgcggtggctcacacctgtaatcccagcactttgggaggccggggcgggcagatcacgaggtcaagaggtcgagaccatcctagctgacaaaaaaccccgtctctactaaaaatagaaaaaattagccgggcgtggtggcaggctcctgtagtcccagctacttgggaggctgaggcaggagaatggtgtgaacccagtagacagagcttgcagtgagccgagatcgcaccactgtactccagcctgggcgacagagcaagactccgtctcaaaaaataaataaataaataaataaaaaagattgtagtaatcaaggctggatgtggtggctcacgcctgtaatccaagcactttgggaggctgaggtgggtggatcacaaggtcaggagtttgagaccagcctggccaacatagtgaaaccccatctctactaaaaatccaaaaattagctgggcatggtggtgcgtgcctgtagtcccatctactcaggaggctgaggcaggagaattgcttgaacccgggaggcagaggttgcagtgagccgagatcacaccactacactccagcctggacaacagagcgagactctgtctcaaaaaaaaaaaaaaacaaagattttaataatccaggggagtagaagtgtactctacaagggagtagaagtagcaggtctggttgagattttggacaagtaggttagaaagctgtcctttgcagtacccagcagtagattaaaatttggagtggagctttcggaataatctttgctatttttctttttttgtttgtttgtttgttaatagagacgaggtctcattatgttgcccaggctggtctcaaactcctggccgcaagcattcctcctatctcagcctcccaaagtgttgagattacaagtgtgaaccactaaacctggcctctttttctttttttttaattcttgttatatcgctgatctcatatgacatcttctctttggttccagactgtaaaaggtgggatttcagagacacgtattgaaaagagaattgtgatcacaggagatgctgatattgaccatgatcaggtgggaatgttgaagagatctgggcctgggaggggtccctgggcaggaagaccgatgaatacaggagtttgtttgccatcttcatctgcaaaaagcctctttggccactctagctcttaattgagaagaaagacaaagacaatcaaagtaagaggcctgtgggatggaggccacagattgaggagccaggaaatgtaatggaaagaacatgagctttggattccaagacttgattcaattgctggttcttaatatattctagctgttaactctctgggcctccattttgcatctgtaagatgaagatgatagtatctccctctcagggttgttgtgagaatcaggtgaaatactggatgaacagctggtggcacatggtgagctcagttaaatggagctattgttattccgaaggtaaaggtacctgaacccatgctagacaacatcaaaacaaagggaagcatgcccctacccttagagagctgtaacagccgagaagacacgagcgggagcatagtatggtggacaagacaccagcagactcgaaacttgttttctgccctacatctctaacttgctgtgtgaccttgggcaaatcacttttccgctgatttttttctcctttcctaaaagagagtgggttgatctagataatttctgggactgagtgctaaaattctatatttttatgttaattgggtgctaattgtgtgctgcaagcaattagcaaataataaggtcaggattaatgttcccagttctctgctgggtgaggttagaacagtaaagctgcagagaagagggggtggaagagattgcatgcaaatgcttctggaatcgttgactgggttgctggagcaataattctgtggcctttttatgctgatatgctgagtgcctttaaaaaaagaaaaactgagctacagtgctggcagttcccttggaggcagggttgagagttacagctgagaatagtggacacagggtcccagaaacaaggctgcaaagcctaaatatcttgcagcctgttggcccagctcagtgggtcccgctgctttagaagcctgcacccacccactcagtctggtgtgatctgagcccctgctacgtgctcagtctgcactagacagcaaaagcaatgtggtgaaaggtgtttgaggtttggagtgagacagacttgggctgaatcctgactctgcgacctaattggttatatgtccttgagcaacttatattaccaacctgagctctagttttaccatctgtaaaataaggatgatcacaggtttcttccagggtcataagggccaaacacacttggtagctcagagagatgctccagtgtccctcaggttttctagttactgagagtgcatggaaggggtaagctatggtacactctggctggcgagggaggcactttaagaactgttaaggagaagcagtgtggagcagcaggtttcatagagaggtgggcggaggcagagtcacaaagagaagacttgagctgggcctgaggtgtgagcagatgggttgggcaaacaggatcagggaggatggtcaggggcccacagaggtggtagttctaagaatgccattcatagagccaggagaccagaagagggttttccttcttcccttgccccttctagagatggttcttaagagccaggtgagtagtcagctggtcatttctagctgagtccttttccataggggagcctgcaaattcagagactgcagcccaaagaggatggtgtttttgctcttttgactttccctctgctctctttagcttttctaaagtaatcaaagctcctccagatcctcaaacagggaccccctcagaaactaaacaacagtgtggtaaagaggaaagtctgatcgacttgagttaaaatccctattgcacggctgggtgcgttggctcacgcctataatcccagtactttgggaggccgagcaaggtggatcacctgaggtcaggagttcgagaccagcctggccaaggtggcaaaacactgtctctactaaaaatacaaaaattagccagacgtggtcacggacacctgtaaccccagctacttgggaggctgaggcacaagaatcgcttgaacccaggaggcagaggtttcagtgagccaagatcacaccactgcactccagcctgggcagtgagactccgtctaaaaaaaaaaaaaaaaaaaaaaagtccctgtttcactacctactagctatgaaacagtaagctctttactgaaattcagtttcctcacctataaaatgcaaaaaattacattaccttaatgcactaagttgtcatgtttaagtaaaaagtaatgataatagttattatcttaataacaatatagttattaataaattataacttaatagagtttaagtaataagtaatgtacttaggctagtgcatggcatataacagtcccttgtcctcttccttcctttcttctactttggccaaggacatctcttcctttttcttgcacacttctttactttcctctcccgtcctgaacttgccacttacccatgctgaacacagatgttgttttgtcctttagattcacatcttgagtgaatcctctcagaccctccaggtataatgatagataatagataggtataatagataatataggccaggtgcagtggctcacacctgtcatcccagcactttgggaggccaagccaggtggatcatttgaggtcaggagttcgagaccagtctggccaacatggtgaaaccccatctctacaaaaaatacaaaaattagctgggcgtagtggtacacacccgtaatcccagctactcaggaggctgaagcaggagaactgcttgaacctgggaggcggaggttgcagtgagccgagattgcaccattgcactccagcctgggtgacggagcgagactccatctcaacaacaacaaaaaataaaaaaaaaataaaggatcatataacagatacagctatgacccccgaagtccctctccagttcctagaagacagcgctaaccttccctgtccctgtgttatcagtccagaagcctccctatgcaggatagggtgggtaaggtaattatcagcttggcttagcctaaagctgccctggtactgcagacaggagtattggatctgtcagaacatcagagaaatgatgaccactgccttccttcgccatcaggctattttctgcctcattgcccttgtttctgtcttttgtaggtccttgtacaagccatcaaggaggcaaaggagcagcacccagacatgtcagtgaccaaggtggtcgtccaccaggagaccgagattgctgatgagtgagctcaggtactgggcgttcctgctggggctgagggtgcccacagtcccagcctgagagggctctggatgggaccctcggacacactgggagcccatccccacaaagaggtgttcaccctgggacttgataaaggcagacgagaggctgatgtgggagatataggaaattaagtatttggctccaactaaagcagcctgtagcagtgccagcattattgggtaagaggagggacccaaacttggatataagcccccagctaccctctgagtcttcatgcatcctgctggagatccacttcaccttccccctctcttctctctactgctctgcttgctgctgtcacaggtctctcttttttttttttttttttttgagacggagtctcattctgtcacccaggcttgagtgcagtggcatgatcttagctcactgcaacctccgcctcccgggttcaaggaattctgccttagccttccaagaaggtgggactacaggcatgtgccaccatgcccagctaatttttgtatttttagtagagacggggtttcaccatgttggccaggttagtctcgaactcctgacctcaaatgatccacctggcttggcctcccaaagtgctgggctgggattacaggcatgagccaccgcgcctggccagtcacaggtatctttgagccagaacctgggaaagccagaggagaaaaaaccaagaagagcaggatcaggctgtctggagatgggtgggcatgcagagcagggaggtaatggctgaagctctgagaccagagtagagagctgggagcagggaagctgctttttgggaaccagggatccagataaattcatgcctaaaagtaattttaaaaagacttgaagaagccaccaatctcactaggtgggaccaggccctgtaaacctgctcacatccccattgtcactgatggccacaggaacttggcaatgggactaggaagctttttcctttgcaggattttaaattttgcttctttgttttctctaggaactaacctaccccaactctgcccttctcccatccaagagaaaccagcaaaatgataaagaagctaacctgccatagtcagacttcagactttcaagattattctaaatcaccagaaaattaatttcagtttctattgggagtttataccaagagattcttctagatctcattgatccttttgaagagctttttctatattaggatatcagaattgttcaacttttcactctatagactgttttaagagttttggggtttttttaattgggtggtttgtaaccccttcagcctagcctctctgcccatttatttccaaccccaacagacactgacagggtccacggaattcttcgggaaatcctccaaggactcttgtcagctgtgttggaggccaaagccagcttagtgggacttccgcgtctctccctagtcttatcccctttggatgatggcagaaacttcatgaaccagccctttctcagagccagtgatgtgagtgtatcagaatgccagggagggcaccagccctgatccacagacctcggaaagatgcccctgttcctttgttgcgggtggttttggtaaggcagagccctctgctgagaatgtagtattgtttttcccctctccctcctgctttctttttggagcttctttgggtcaaagacatggaagttgcttcagatatctgatactgtgaatgtttgaacatatccgtggccttcacctctccagctacccttttacctcatcagaagcagtggctcagctaagtgctccccctagctcccatctcaggagaccaaatctcacagaaaaataggcactttgggccaaaagctctaatggaacatttttagtggtgatttggggaaggaaagttaatgaggtttttaaaataaggttttctagttttgagagtgtgcacttcacacaggggaatggggttacttctgtctgatcctgggcctttctttcatcccaaatgacaaggaatgtggctcagagaagggtttttcttttttgacctttcttctctcaacaggaacctgcctgaggacacccttctagagcaaggaattgacttttaggagccgttctccccacaagacaccacatgacaaggggtataagccccagccctgctcattcccactcaccagctgaggtctgtcaggttttgaaggcttgattttgtggtgggtttggggcttagttttcctttttttcattttgatttttgaaagtgaagatgatgccctaattcctggtaaggatttggggcatagttttttgtttttttgagacggagtttcgctcttgttgcccaagctggagtgcagtggcgcgatctcggctcactgcaacctccgcctcctgggttcaggcagttctcttgcctcagcctcccaagtagctgggatgacaggcgcacaccaccacgcccagcaaattttttgtatttttagtagaaacgggatttcaccttgttaggctggtctcgaactcctgacctcaggtgatccacccaccttggcctcccaaagtgctgggattacaggtgtgagccaccacgcccggccgatttggggcatttttatttaacagaacttctctaaccttccaactgcttcccacaaacacattggcctcaaggctccttagaatcccagttccagcttcctaaaatagacagtgggtatcgggcagcagtcactggggctcaagggcagtgagcaagagaaatgtctaaagctgcttctcccaacaccgtccaaagtctccactgcctgagttttgtttcggctggtttgaactcatttcgggtgtgtgcatttttcttttggtacccatgtgagacatgaacaacaggagggagggaaagagcccaggtgggacgtgggacaggcttaggggaaagagcttgtcctatctcaggaacaaaattataggctgtgggcagagggtctgaaaggtgggctttggggtagtgcccaagcctggtcgtgttgccaggagtggtgacaagaaatgcagcttacatcaaacgaacatgtagtgcatgcccagtgcctgatggccagatggcctgtaggaagagctaccagggcttccagacctgtggaacgaagaggatggggaaaaggcagagggcactgagtgtccctttaaaaactaacacactgaatattccgtgtgatctagaacagtgtggcagctttcacagcacaggaccgttcatcgggggcctaaacgtttccctcggctctgtcaccaactcacttctctcggcttcgttgtctgtaaattggatgaaaagagctctaatgcctttcaggctcttagaagccatagatttggacaagcccagcaagatgggtgtccttccaggcctcttcccctttcctccatctctggcaacagttcttggggtttggcaattgtttggattttttttctttctgcagttgtgtgtatgtgtgtttgtgtgaagaaaaacagactctgtccaggtagaaatggtgaggagggggaagagaattacatttccagggtcagaaacttggcaacagttttcctagagtgactcagacacaccacagtaacaactctcgctgcaattttattttaatttgagaaataaagatttcctccaagccacatgaggactctggcacccacccacaaagcaagacctgtatttataagccgagggctcagggagcctaactgcgggacccgtcagggccccgtgacccatccccgtccccacccccccctccaccgctgggcccatcagtgtgtgttggggggatgcttggcagctgggggtgaggagacaacaaacctcgggaactggagccagagctgcggcctgactgacgccttttgatgctcacgggaaatttctgcccaggatctcagccccaggctggttgtttctacaaatctctctcaaatgtattattttggtgacaaaaatgaaggagctttgtaaatttttttaaaattatgaatcatatcaagtagttgtttacatttcttgaaaaaataggaactcgggcagcagaatcagattggcagaatctttagactacacaggcaataatcaagtctgctgttttggcctttcgtagtagaagtggttgtagtgtttagatatctgtttggtcttgcttcttgtattgcatttttttcaataaacaacaacaaaaagaactctctctgtgaggattgatccacttttaaatttctcttctaccagcaacttgggaaaaattaaatatgggtgggggagacctaaactcaagtcattttctaaagtaagttacccacattgaccaaaatgcagcttcaacgttgagtaaagggatttctgagagctggccaatgccttttgccagctgcagtgagattctgcagcataggccacgataaaggaaggagagaaggggcttctcagacttatttgcagaggggcccagaactcagtatgaaggcattggcagtagtgtagctctagagggatataccccagatggctgagggaagaaagggattgaggtggtaggagttcaaggctcagtccccgtcccagatggcagtggagagtctcatcccgtggtccatcttcccagaggccccacactccatcaccagtgccgccttggagggagc

SEQ ID NO: 1466 - DNA, 12212 bp, Homo sapiens
gcagacatgcaccaccacacccggctaattttgtatttttagtagagatggggtttctccatgttggtcattctggtctcaaactccccacctcaggtgatctgcccccctcggtctcccaaagtgctgggattataggcctgagccaccgtgcccggcccctgcctcctatttctgatccattcctgtcactgactcagtgctaaggaaactatacccatccaactttcttagaaggaactttgtgcccagggaatttattttattttattttatttatttatttttagacagagtctcactctgttgcccaggctggaagtacagtggcgggatcttggctcactgcaacttccacctcccaggttcaagcatttcttctgcctcagcctcccgagtagctgggattataggcaagcaccaccacgtccggctaattttgtttttttagtagacacagggtttcactctgttggccaggctggtctcaaacccctgacctcaggtgatccacccgcctacccctcccaaagtgctaggattacaggcatgagccaccgagcatggcccaatttattttatttgttaagaggttaccctgaaaaaaaaaaaaaaaagaggttaccctggccgggtgcggtagctcacacctgtaatgccagtactttgggaggccgaggcaggcggatcacctgaggtggggagtttgagaccagcctgaccaacatggagaaaccccatctctactaaaaatacaaaattagcccggtgtggtggtgcatgcctgtaatcccagctactcaggaggctgaggcaggagaattgcttgaaaccgggaagcggaggttgcagtgagctgagatcacgccactgcattccagcctgggcgacaagagtgaaactccgtctcaaaaaaaaaaaaagaggtcattctaagggaatgagatttttgcatcagaatgtgcagctgaagagcaaagctgcagcctgcaacatttgcccagtcttcctgagaggcatgatgatgagccatgctttcttctgcagactgacgacaacagtggagacttggacccaggagtcttgctgacagctcaaactatcacatctgagaccccaagcagcaccaccacaactcaaattaccaaggtaacagaccagctagaacctctttatggaacccaggggcaggctaagcttgctgccacctctctgcaagaaggaccctagtccataagcaaatattttcagctccatccctagtaagccacattattcaaagagtcctggatggaaaggccctgctgccttccccagcaataaatctagggagataccctgagagtatccctgcctacttagtagtctcctaaaggtaggtgtggttgttctctttacacatctgtctctctggtcagtgagtcccctgtctggctgtggaagtaagtttaaaaagtcagcatggccaggcatggtggcccacacctgtaatcccagcactttgggaggccaaggcaggtggatcacctgagatcaggagtacgagactagcctgaccaacatggtaaaaccccgtctctactaagaatacataaattagccgggtgtggcggcatacacctgtagtcccagctattcgggaggctgagggaggagaattgcttgaacccaggaagcagagattacagtgagcagagattgcgccactgcactccagcctgggtgagcgagcagactctatctcaatagaaagttaacttaaggggccaggcgtggtgtaatcacacctgtaatcccagtactttgggaggctgagacaggtggatccctttagcccaggagtttgagattagccttggcaacatagtgaaacctcatctgtacaaaaaaatacaaaaaaaaaaaaaatgtgctgggcataatggcgcatgcctgtggtcccagctacttgggaggctgaggtgggaggatcacttgagcccagggcatcaaggctgcagtaagccgtgatcatgccactgcactccagcctgagtgacagagcaagaccctaaaacctatctctgtaaaaacaaaacaaaacaaaaagtcagcttcagggaaattatttttggtatttttatacaaccatattttccaagcccaaaatcagaactctgggtctgaggaagaatttttacagcattccagggacaaggccatgagaacttgtttggatgctgaaatattggaattattagaatgtagtttataggaagcaagagagagaaaatatctaaaattggaactacccccagaaaatcagaggcaatcgatgtttgctgtaacactagaggaaaatactttttttaataggtaagaaatatagcttcttgaccaagctctctcatcaatacacagatgactggaaactagttaacttaatgtgtctagaccttggttttcctcatctaccagaaagagaaatctactcaccctcaggagattatgtgaggaccttttgacatcaataatatgaaaatgctttaaaatacaagagcccagtttcaagctgtgtgacatatttgttcatagccttcagatttttttcctcttgaaaatgatcatggtggctcatgcctgtaatcccaacactttgggaggccaaggcgggcggatcacctgagatcaggagttcaagaccagcctggccaacatggcgaaaccccatctctactaaaaaaataaaaattagccgagcatggtggcacacgcctatagtcccagctactcgggaggcttaggcaggagaatcacttgaacccaagaggcggaggttgcagtgagctaagatcatgccactgcactctagcctgagcaacagagcaagactccatctcaaaaaaaaaaaaagaaaaagaaaatgatcaattaaaatgtatagcatcagtatccagtctctaaaacagaaatgtatgagagaagagcacagaaagtcctattttgtttacttgctagatttctgtggtattcaggaggaagaaaaaggagaaagtaaatacagaattgtgactttctgtttagcttaataaagattttagtaatccaggctgggcgcggtggctcacacctgtaatcccagcactttgggaggccggggcgggcagatcacgaggtcaagaggtcgagaccatcctagctgacaaaaaaccccgtctctactaaaaatagaaaaaattagccgggcgtggtggcaggcgcctgtagtcccagctacttgggaggctgaggcaggagaatggtgtgaacccagtagacagagcttgcagtgagccgagatcgcaccactgtactccagcctgggcgacagagcaagactccgtctcaaaaaataaataaataaataaataaaaaagattgtagtaatcaaggctggatgtggtggctcacgcctgtaatccaagcactttgggaggctgaggtgggtggatcacaaggtcaggagtttgagaccagcctggccaacatagtgaaaccccatctctactaaaaatccaaaaattagctgggcatggtggtgcgtgcctgtagtcccatctactcaggaggctgaggcaggagaattgcttgaacccgggaggcagaggttgcagtgagccgagatcacaccactacactccagcctggacaacagagcgagactctgtctcaaaaaaaaaaaaaaacaaagattttaataatccaggggagtagaagtgtactctacaagggagtagaagtagcaggtctggttgagattttggacaagtaggttagaaagctgtcctttgcagtacccagcagtagattaaaatttggagtggagctttcggaataatctttgctatttttctttttttgtttgtttgtttgttaatagagacgaggtctcattatgttgcccaggctggtctcaaactcctggccgcaagcattcctcctatctcagcctcccaaagtgttgagattacaagtgtgaaccactaaacctggcctctttttctttttttttaattcttgttatatcgctgatctcatatgacatcttctctttggttccagactgtaaaaggtgggatttcagagacacgtattgaaaagagaattgtgatcacaggagatgctgatattgaccatgatcaggtgggaatgttgaagagatctgggcctgggaggggtccctgggcaggaagaccgatgaatacaggagtttgtttgccatcttcatctgcaaaaagcctctttggccactctagctcttaattgagaagaaagacaaagacaatcaaagtaagaggcctgtgggatggaggccacagattgaggagccaggaaatgtaatggaaagaacatgagctttggattccaagacttgattcaattgctggttcttaatatattctagctgttaactctctgggcctccattttgcatctgtaagatgaagatgatagtatctccctctcagggttgttgtgagaatcaggtgaaatactggatgaacagctggtggcacatggtgagctcagttaaatggagctattgttattccgaaggtaaaggtacctgaacccatgctagacaacatcaaaacaaagggaagcatgcccctacccttagagagctgtaacagccgagaagacacgagcgggagcatagtatggtggacaagacaccagcagactcgaaacttgttttctgccctacatctctaacttgctgtgtgaccttgggcaaatcacttttccgctgatttttttctcctttcctaaaagagagtgggttgatctagataatttctgggactgagtgctaaaattctatatttttatgttaattgggtgctaattgtgtgctgcaagcaattagcaaataataaggtcaggattaatgttcccagttctctgctgggtgaggttagaacagtaaagctgcagagaagagggggtggaagagattgcatgcaaatgcttctggaatcgttgactgggttgctggagcaataattctgtggcctttttatgctgatatgctgagtgcctttaaaaaaagaaaaactgagctacagtgctggcagttcccttggaggcagggttgagagttacagctgagaatagtggacacagggtcccagaaacaaggctgcaaagcctaaatatcttgcagcctgttggcccagctcagtgggtcccgctgctttagaagcctgcacccacccactcagtctggtgtgatctgagcccctgctacgtgctcagtctgcactagacagcaaaagcaatgtggtgaaaggtgtttgaggtttggagtgagacagacttgggctgaatcctgactctgcgacctaattggttatatgtccttgagcaacttatattaccaacctgagctctagttttaccatctgtaaaataaggatgatcacaggtttcttccagggtcataagggccaaacacacttggtagctcagagagatgctccagtgtccctcaggttttctagttactgagagtgcatggaaggggtaagctatggtacactctggctggcgagggaggcactttaagaactgttaaggagaagcagtgtggagcagcaggtttcatagagaggtgggcggaggcagagtcacaaagagaagacttgagctgggcctgaggtgtgagcagatgggttgggcaaacaggatcagggaggatggtcaggggcccacagaggtggtagttctaagaatgccattcatagagccaggagaccagaagagggttttccttcttcccttgccccttctagagatggttcttaagagccaggtgagtagtcagctggtcatttctagctgagtccttttccataggggagcctgcaaattcagagactgcagcccaaagaggatggtgtttttgctcttttgactttccctctgctctctttagcttttctaaagtaatcaaagctcctccagatcctcaaacagggaccccctcagaaactaaacaacagtgtggtaaagaggaaagtctgatcgacttgagttaaaatccctattgcacggctgggtgcgttggctcacgcctataatcccagtactttgggaggccgagcaaggtggatcacctgaggtcaggagttcgagaccagcctggccaaggtggcaaaacactgtctctactaaaaatacaaaaattagccagacgtggtcacggacacctgtaaccccagctacttgggaggctgaggcacaagaatcgcttgaacccaggaggcagaggtttcagtgagccaagatcacaccactgcactccagcctgggcagtgagactccgtctaaaaaaaaaaaaaaaaaaaaaaagtccctgtttcactacctactagctatgaaacagtaagctctttactgaaattcagtttcctcacctataaaatgcaaaaaattacattaccttaatgcactaagttgtcatgtttaagtaaaaagtaatgataatagttattatcttaataacaatatagttattaataaattataacttaatagagtttaagtaataagtaatgtacttaggctagtgcatggcatataacagtcccttgtcctcttccttcctttcttctactttggccaaggacatctcttcctttttcttgcacacttctttactttcctctcccgtcctgaacttgccacttacccatgctgaacacagatgttgttttgtcctttagattcacatcttgagtgaatcctctcagaccctccaggtataatgatagataatagataggtataatagataatataggccaggtgcagtggctcacacctgtcatcccagcactttgggaggccaagccaggtggatcatttgaggtcaggagttcgagaccagtctggccaacatggtgaaaccccatctctacaaaaaatacaaaaattagctgggcgtagtggtacacacccgtaatcccagctactcaggaggctgaagcaggagaactgcttgaacctgggaggcggaggttgcagtgagccgagattgcaccattgcactccagcctgggtgacggagcgagactccatctcaacaacaacaaaaaataaaaaaaaaataaaggatcatataacagatacagctatgacccccgaagtccctctccagttcctagaagacagcgctaaccttccctgtccctgtgttatcagtccagaagcctccctatgcaggatagggtgggtaaggtaattatcagcttggcttagcctaaagctgccctggtactgcagacaggagtattggatctgtcagaacatcagagaaatgatgaccactgccttccttcgccatcaggctattttctgcctcattgcccttgtttctgtcttttgtaggtccttgtacaagccatcaaggaggcaaaggagcagcacccagacatgtcagtgaccaaggtggtcgtccaccaggagaccgagattgctgatgagtgagctcaggtactgggcgttcctgctggggctgagggtgcccacagtcccagcctgagagggctctggatgggaccctcggacacactgggagcccatccccacaaagaggtgttcaccctgggacttgataaaggcagacgagaggctgatgtgggagatataggaaattaagtatttggctccaactaaagcagcctgtagcagtgccagcattattgggtaagaggagggacccaaacttggatataagcccccagctaccctctgagtcttcatgcatcctgctggagatccacttcaccttccccctctcttctctctactgctctgcttgctgctgtcacaggtctctcttttttttttttttttttttgagacggagtctcattctgtcacccaggcttgagtgcagtggcatgatcttagctcactgcaacctccgcctcccgggttcaaggaattctgccttagccttccaagaaggtgggactacaggcatgtgccaccatgcccagctaatttttgtatttttagtagagacggggtttcaccatgttggccaggttagtctcgaactcctgacctcaaatgatccacctggcttggcctcccaaagtgctgggctgggattacaggcatgagccaccgcgcctggccagtcacaggtatctttgagccagaacctgggaaagccagaggagaaaaaaccaagaagagcaggatcaggctgtctggagatgggtgggcatgcagagcagggaggtaatggctgaagctctgagaccagagtagagagctgggagcagggaagctgctttttgggaaccagggatccagataaattcatgcctaaaagtaattttaaaaagacttgaagaagccaccaatctcactaggtgggaccaggccctgtaaacctgctcacatccccattgtcactgatggccacaggaacttggcaatgggactaggaagctttttcctttgcaggattttaaattttgcttctttgttttctctaggaactaacctaccccaactctgcccttctcccatccaagagaaaccagcaaaatgataaagaagctaacctgccatagtcagacttcagactttcaagattattctaaatcaccagaaaattaatttcagtttctattgggagtttataccaagagattcttctagatctcattgatccttttgaagagctttttctatattaggatatcagaattgttcaacttttcactctatagactgttttaagagttttggggtttttttaattgggtggtttgtaaccccttcagcctagcctctctgcccatttatttccaaccccaacagacactgacagggtccacggaattcttcgggaaatcctccaaggactcttgtcagctgtgttggaggccaaagccagcttagtgggacttccgcgtctctccctagtcttatcccctttggatgatggcagaaacttcatgaaccagccctttctcagagccagtgatgtgagtgtatcagaatgccagggagggcaccagccctgatccacagacctcggaaagatgcccctgttcctttgttgcgggtggttttggtaaggcagagccctctgctgagaatgtagtattgtttttcccctctccctcctgctttctttttggagcttctttgggtcaaagacatggaagttgcttcagatatctgatactgtgaatgtttgaacatatccgtggccttcacctctccagctacccttttacctcatcagaagcagtggctcagctaagtgctccccctagctcccatctcaggagaccaaatctcacagaaaaataggcactttgggccaaaagctctaatggaacatttttagtggtgatttggggaaggaaagttaatgaggtttttaaaataaggttttctagttttgagagtgtgcacttcacacaggggaatggggttacttctgtctgatcctgggcctttctttcatcccaaatgacaaggaatgtggctcagagaagggtttttcttttttgacctttcttctctcaacaggaacctgcctgaggacacccttctagagcaaggaattgacttttaggagccgttctccccacaagacaccacatgacaaggggtataagccccagccctgctcattcccactcaccagctgaggtctgtcaggttttgaaggcttgattttgtggtgggtttggggcttagttttcctttttttcattttgatttttgaaagtgaagatgatgccctaattcctggtaaggatttggggcatagttttttgtttttttgagacggagtttcgctcttgttgcccaagctggagtgcagtggcgcgatctcggctcactgcaacctccgcctcctgggttcaggcagttctcttgcctcagcctcccaagtagctgggatgacaggcgcacaccaccacgcccagcaaattttttgtatttttagtagaaacgggatttcaccttgttaggctggtctcgaactcctgacctcaggtgatccacccaccttggcctcccaaagtgctgggattacaggtgtgagccaccacgcccggccgatttggggcatttttatttaacagaacttctctaaccttccaactgcttcccacaaacacattggcctcaaggctccttagaatcccagttccagcttcctaaaatagacagtgggtatcgggcagcagtcactggggctcaagggcagtgagcaagagaaatgtctaaagctgcttctcccaacaccgtccaaagtctccactgcctgagttttgtttcggctggtttgaactcatttcgggtgtgtgcatttttcttttggtacccatgtgagacatgaacaacaggagggagggaaagagcccaggtgggacgtgggacaggcttaggggaaagagcttgtcctatctcaggaacaaaattataggctgtgggcagagggtctgaaaggtgggctttggggtagtgcccaagcctggtcgtgttgccaggagtggtgacaagaaatgcagcttacatcaaacgaacatgtagtgcatgcccagtgcctgatggccagatggcctgtaggaagagctaccagggcttccagacctgtggaacgaagaggatggggaaaaggcagagggcactgagtgtccctttaaaaactaacacactgaatattccgtgtgatctagaacagtgtggcagctttcacagcacaggaccgttcatcgggggcctaaacgtttccctcggctctgtcaccaactcacttctctcggcttcgttgtctgtaaattggatgaaaagagctctaatgcctttcaggctcttagaagccatagatttggacaagcccagcaagatgggtgtccttccaggcctcttcccctttcctccatctctggcaacagttcttggggtttggcaattgtttggattttttttctttctgcagttgtgtgtatgtgtgtttgtgtgaagaaaaacagactctgtccaggtagaaatggtgaggagggggaagagaattacatttccagggtcagaaacttggcaacagttttcctagagtgactcagacacaccacagtaacaactctcgctgcaattttattttaatttgagaaataaagatttcctccaagccacatgaggactctggcacccacccacaaagcaagacctgtatttataagccgagggctcagggagcctaactgcgggacccgtcagggccccgtgacccatccccgtccccacccccccctccaccgctgggcccatcagtgtgtgttggggggatgcttggcagctgggggtgaggagacaacaaacctcgggaactggagccagagctgcggcctgactgacgccttttgatgctcacgggaaatttctgcccaggatctcagccccaggctggttgtttctacaaatctctctcaaatgtattattttggtgacaaaaatgaaggagctttgtaaatttttttaaaattatgaatcatatcaagtagttgtttacatttcttgaaaaaataggaactcgggcagcagaatcagattggcagaatctttagactacacaggcaataatcaagtctgctgttttggcctttcgtagtagaagtggttgtagtgtttagatatctgtttggtcttgcttcttgtattgcatttttttcaataaacaacaacaaaaagaactctctctgtgaggattgatccacttttaaatttctcttctaccagcaacttgggaaaaattaaatatgggtgggggagacctaaactcaagtcattttctaaagtaagttacccacattgaccaaaatgcagcttcaacgttgagtaaagggatttctgagagctggccaatgccttttgccagctgcagtgagattctgcagcataggccacgataaaggaaggagagaaggggcttctcagacttatttgcagaggggcccagaactcagtatgaaggcattggcagtagtgtagctctagagggatataccccagatggctgagggaagaaagggattgaggtggtaggagttcaaggctcagtccccgtcccagatggcagtggagagtctcatcccgtggtccatcttcccagaggccccacactccatcaccagtgccgccttggagggagc

SEQ ID NO: 1467 - DNA, 4804 bp, Homo sapiens
aggtccttgtacaagccatcaaggaggcaaaggagcagcacccagacatgtcagtgaccaaggtggtcgtccaccaggagactgagattgctgatgagtgagctcaggtactgggcgttcctgctggggctgagggtgcccacagtcccagcctgagagggctctggatgggaccctcggacacactgggagcccatccccacaaagaggtgttcaccctgggacttgataaaggcagacgagaggctgatgtgggagatataggaaattaagtatttggctccaactaaagcagcctgtagcagtgccagcattattgggtaagaggagggacccaaacttggatataagcccccagctaccctctgagtcttcatgcatcctgctggagatccacttcaccttccccctctcttctctctactgctctgcttgctgctgtcacaggtctctcttttttttttttttttttttgagacggagtctcattctgtcacccaggcttgagtgcagtggcatgatcttagctcactgcaacctccgcctcccgggttcaaggaattctgccttagcctcccaagaaggtgggactacaggcatgtgccaccatgcccagctaatttttgtatttttagtagagacggggtttcaccatgttggccaggttagtctcgaactcctgacctcaaatgatccacctggcttggcctcccaaagtgctgggctgggattacaggcatgagccaccgcgcctggccagtcacaggtatctttgagccagaacctgggaaagccagaggagaaaaaaccaagaagagcaggatcaggctgtctggagatgggtgggcatgcagagcagggaggtaatggctgaagctctgagaccagagtagagagctgggagcagggaagctgctttttgggaaccagggatccagataaattcatgcctaaaagtaattttaaaaagacttgaagaagccaccaatctcactaggtgggaccaggccctgtaaacctgctcacatccccattgtcactgatggccacaggaacttggcaatgggactaggaagctttttcctttgcaggattttaaattttgcttctttgttttctctaggaactaacctaccccaactctgcccttctcccatccaagagaaaccagcaaaatgataaagaagctaacctgccatagtcagacttcagactttcaagattattctaaatcaccagaaaattaatttcagtttctattgggagtttataccaagagattcttctagatctcattgatccttttgaagagctttttctatattaggatatcagaattgttcaacttttcactctatagactgttttaagagttttggggtttttttaattgggtggtttgtaaccccttcagcctagcctctctgcccatttatttccaaccccaacagacactgacagggtccatggaattcttcgggaaatcctccaaggactcttgtcagctgtgttggaggccaaagccagcttagtgggacttccgcgtctctccctagtcttatcccctttggatgatggcagaaacttcatgaaccagccctttctcagagccagtgatgtgagtgtatcagaatgccagggagggcaccagccctgatccacagacctcggaaagatgcccctgttcctttgttgcgggtggttttggtaaggcagagccctctgctgagaatgtagtattgtttttcccctctccctcctgctttctttttggagcttctttgggtcaaagacatggaagttgcttcagatatctgatactgtgaatgtttgaacatatccgtggccttcacctctccagctacccttttacctcatcagaagcagtggctcagctaagtgctccccctagctcccatctcaggagaccaaatctcacagaaaaataggcactttgggccaaaagctctaatggaacatttttagtggtgatttggggaaggaaagttaatgaggtttttaaaataaggttttctagttttgagagtgtgcacttcacacaggggaatggggttacttctgtctgatcctgggcctttctttcatcccaaatgacaaggaatgtggctcagagaagggtttttcttttttgacctttcttctctcaacaggaacctgcctgaggacacccttctagagcaaggaattgacttttaggagccgttctccccacaagacaccacatgacaaggggtataagccccagccctgctcattcccactcaccagctgaggtctgtcaggttttgaaggcttgattttgtggtgggtttgggacttagttttcctttttttcattttgatttttgaaagtgaagatgatgccctaattcctggtaaggatttggggcatagttttttgtttttttgagacggagtttcgctcttgttgcccaagctggagtgcagtggcgcgatctcggctcactgcaacctccgcctcctgggttcaagcagttctcttgcctcagcctcccaagtagctgggatgacaggcgcacaccaccacgcccagcaaattttttgtatttttagtagaaacgggatttcaccttgttaggctggtctcgaactcctgacctcaggtgatccacccaccttggcctcccaaagtgctgggattacaggtgtgagccaccacgcccggccgatttggggcatttttatttaacagaacttctctaaccttccaactgcttcccacaaacacattggcctcaaggctccttagaatcccagttccagcttcctaaaatagacagtgggtatcgggcagcagtcactggggctcaagggcagtgagcaagagaaatgtctaaagctgcttctcccaacaccgtccaaagtctccactgcctgagttttgtttcggctggtttgaactcatttcgggtgtgtgcatttttcttttggtacccatgtgagacatgaacaacaggagggagggaaagagcccaggtgggacgtgggacaggcttaggggaaagagcttgtcctatctcaggaacaaaattataggctgtgggcagagggtctgaaaggtgggctttggggtagtgcccaagcctggtcgtgttgccaggagtggtgacaagaaatgcagcttacatcaaacgaacatgtagtgcatgcccactgcctgatggccagatggcctgtaggaagagctaccagggcttccagacctgtggaacgaagaggatggggaaaaggcagagggcactgagtgtccctttaaaaactaacccactgaatattccgtgtgatctagaacagtgtggcagctttcacagcacaggaccgttcatcgggggcctaaacgtttccctcagctctgtcaccaactcacttctctcggcttcgttgtctgtaaattggatgaaaagagctctaatgcctttcaggctcttagaagccatagatttggacaagcccagcaagatgggtgtccttccaggcctcttcccctttcctccatctctggcaacagttcttggggtttggcaattgtttggattttttttctttctgcagttgtgtgtatgtgtgtttgtgtgaagaaaaacagactctgtccaggtagaaatggtgaggagggggaagagaattacatttccagggtcagaaacttggcaacagttttcctagagtgactcagacacaccacagtaacaactctcgctgcaattttattttaatttgagaaataaagatttcctccaagccacatgaggactctggcacccacccacaaagcaagacctgtatttataagccgagggctcagggagcctaactgcgggacccgtcaggggcccgtgacccatccccgtccccacccccccctccaccgctgggcccatcagtgtgtgttggggggatgcttggcagctgggggtgaggagacaacaaacctcgggaactggagccagagctgcggcctgactgacgccttttgatgctcacgggaaatttctgcccaggatctcagccccaggctggttgtttctacaaatctctctcaaatgtattattttggtgacaaaaatgaaggagctttgtaaatttttttaaaattatgaatcatatcaagtagttgtttacatttcttgaaaaaataggaactcgggcagcagaatcagattggcagaatctttagactacacaggcaataatcaagtctgctgttttggcctttcgtagtagaagtggttgtagtgtttagatatctgtttggtcttgcttcttgtattgcatttttttcaataaacaacaacaaaaagaactctctctgtgaggattgatccacttttaaatttctcttctaccagcaacttgggaaaaattaaatatgggtgggggagacctaaactcaagtcattttctgaagtaagttacccacattgaccaaaatgcagcttcaacgttgagtaaagggatttctgagagctggccaatgccttttgccagctgcagtgagattctgcagcataggccacgataaaggaaggagagaaggggcttctcagacttatttgcagaggggcccagaactcagtatgaaggcattggcagtagcgtagctctagagggatataccccagatggctgagggaagaaagggattgaggtggtaggagttcaaggctcagtccccgtcccagatggcagtggagagtctcatcccgtggtccatcttcccagaggccccacactccatcaccagtgccgccttggagggagc

SEQ ID NO: 1468 - DNA, 661 bp, Homo sapiens
acctcccagtcttaggggcccttgcccaccactttcttgggtttgccaagacactgggtacatctcccagtcaccctggcctggacctccagccctgttagggctaaggccacttacagaggctgaagaaattcctgaggcgagtcctccacaccccacagtgaaacgcaccctctccagctcactgagccctggtgcagctggcatttctctgcccgcatgcaggtcaggatgcccttcacagctgctgtggtcagagcatccatccccagcctgggatgtgactgaaacatctattagacgttgggactcctggtcctttggtcctattagcatggtccatgctgcagcctcagagcaggctgtctcccctctcttcagacccgggcccccaagtcccctcctcctcccaatttggcatagcccccaagactgaggcggtccagccgtggccagcttcggtgagcacagtcccgagctgctggggccccaaggaggagctccccaaggcccagatccagagacttggaatgttcaatgcaggagccagacggctgcacggtgatgatcacatggccagtctgcgtccgtggaccccagggtgggggcagcccggggcccttcagcgggtagctgttgagcaaggcaggtaaccccaagc

SEQ ID NO: 1469 - DNA, 124 bp, Homo sapiens
gcggatcacctgaggtggggagtttgagaccagcctgaccaacatggagaaaccccatctctactaaaaatacaaaattagcccggtgtggtggtgcatgcctgtaatcccagctactcaggag

SEQ ID NO: 1470 - DNA, 661 bp, Homo sapiens; identical to SEQ ID NO: 1468

SEQ ID NO: 1471 - DNA, 518 bp, Homo sapiens
cctggctttttttttttttttttttttttttgagacagagtctcgctctgtcgcccaggctgaagggcagtggcgcgatctcggctcactgcaagctccgcctcccaggtttacgccattctcctgcctcagcctcccaagtagctgggactacaggtgcctgccaccacacctggctaattttttgttttttagtagagacggggtttcaccgtgttagctaggatggtctcgatctcctgacctcgtgatccacccgcctcggcctcccaaagtgctgggattacaggcgtgagccaccgtgcctggccccggctaatttttttgtatttttagtagagatggggcttcgccatgttggccaggctggtctcaaactcctgacctcaagtgatcagcccgcctcagcctcccaaagtgctaggactataggtgtgagccaccaagcccggcctgtgaaccaacttttatcaccttctccagttccagaaactaaataataatttggatagtttacc

SEQ ID NO: 1472 - DNA, 661 bp, Homo sapiens; identical to SEQ ID NO: 1468

SEQ ID NO: 1473 - DNA, 875 bp, Homo sapiens
gacctcatcttaatgaattaagtctgggaatataattatgtctgggaatataatagagaagactctatttcctgtgttctgggtgagtatgaacttttgggggatactaacttactatatactcactaggttaatctatgctaaatacccaacaggaaggcagctgtagggaaaagcaagagtatgaaacctggaaaaacaattgccagactctgctgcttgtgggtatgtggccgtgggtaaggtagttgctctgtgctttcagcttcctcatgtacaaaattgagataataatgatgcccactttgtggaattcttgtaaagatgaaaagattccaaatatgtaaagtgcatagaacaatccccagcaaaaagtggaacatgttagtgataattgctgtcatagtcggtcttcttgcttagtaggcctgagataaaactttctcctatttcatccctcctcctccctcttcctgattttacatgttatttagttgtttctccctctcactataattatttgtgagaagttacaagagttatactatggtagagcagacaggctttgcacaccttcagggtcagttctggaccaaaccactcagaaaccactgcacggatgaatggctggagattgtggggcctattgtgtctccaggtggctgtggttacatgggatccctggaatgttaattaattttcatatttccctttaaggtacttctgtggctcaaacaatgaatttctgagttaggtcccaaagtggcatttttgtttgccaacaccctcataggaaactgtattagaagctttcttgtaatatttaagagcctttaaaagagcgagactccgtctccaaaaaaaacaaaaaaaaa

SEQ ID NO: 1474 - DNA, 524 bp, Homo sapiens
caagaaatgccttctgtctcagggaagcccttaccagaacctctaggtagagttagaggctaactccacggcaccctagagtccatagcatgttgttatcatgtgtgtatcgttgcatgtaaaaatattcctatttgttacggtttgcttgtatgtgtttgtcattaatctattaattcattcagtgaagagatgccaacttgtatactagcctgggaaacctctgtgtcctcagtgcctaatttaatactcctttttctatctagtagtaaaatgaatatgaatgtacatgtctgaggtctctataaattaaaaggtaaaaagtcttaagccaggtgtggtggcatgcacctgtattcgcagatatttgggaggttgaggtgggagcattgcttgaggccagaagtttgaggctgtagtgtgcaatgctcttacctgtgaatagccatggccctccaacatgggcaatgcagtgagaccctgtctttaaaaaaaaaaaaaaaaaaaaaaaaaaaaagaaaaaa

SEQ ID NO: 1475 - DNA, 561 bp, Homo sapiens
gaatcatcagagatgaaactgtttgagagactcatgtgaccttacgaaaattacaacagcagtcttaaagtatgaaaaagatgcatcacagcagagacattatggcccagttgatatcaaatgtaaaatgtaaatgcatgtaaatgcacacttcattttatgtattatttagtaatttgcagtggtatgtgtttaatatttttgctacctacacattaggcaaaaaaaagatgtaaataatttgggagaaaaagaggaagaacagtgtaaaataaaactttctataagtactccatttcaatgtgttcaacatcatcctaaaaggcaagattttcccacgcaggtgacaaggtggtttatgtactatttaagggcggaaggtgcgtgcccgttcaataagcatgttttttgccaggtaggaaatatgttccatatctttacttatcattgcatttcagatgggaactagaaaaactggagagaaaaatgtaatgaaactgctgctgtaaattattccttttagcatgtattcacttgctaaatacacatttcttcaaaata

SEQ ID NO: 1476 - DNA, 561 bp, Homo sapiens; identical to SEQ ID NO: 1475

SEQ ID NO: 1477 - DNA, 561 bp, Homo sapiens; identical to SEQ ID NO: 1475

SEQ ID NO: 1478 - DNA, 1741 bp, Homo sapiens
gaaaaatggaatacactgatctactactgatgtcttctttcagctttgatctaaagatgtattttattaaaactataatttaaatgtaccatgaaaaatatgcagtaaaaattagttgttttctaagctagagtaggatttgtcttacaattattgtgctatgtagtttttgttttaaaaattccaatggtgtgctgctttctttggacattttattttcaattctataagagggatagatgacattgttctagaaacacatatacatcattaagagtgaatctctaaaaccaggatataaattatgctttatttctctgagaaaatcaaacaaatggaagctgttcacacctccccttctttaagcattatctaaattaatttttacttgcataatgttcttagaaaaaaaaacagaacatttaagcaggaaaaaaggaagaaacaagttgatttttaagtgcattttactataatgaatcaatgaagggaaaaggaactgcatatttcatgaaaataataagcattgtcttaatatactgttaatagaaaatgtgtcttaattccgtgcttgaatccctgcatgatatttgagactaagatctctcttatgattctaccaagaattatatctgtgtcacttaatttttttaaaagagagagatcaataactattcagagcaacatgttaaaggcaaagtttccaatcatttacatctgtatcaggtgcctcttacctttccttatttaagacaattatttgtacaagaaacacatgactcttttcatatcaatgggagggacttttctacaaagtattttccaggatgcaacccacatttaaacaatgtaaaattctttgtttcctgcaacaacttacaaaataaggtaaaagactaaaattcaagatttgcttccttcattgtcctaagacgattcgttgagaatcactgactttgagatatttaaaactttcagcattatactgtggtttcttttgcactgcactcacctattcaggactcctcccccaggttcctcatcatgcacaaaaatgcaaagaaaacatcttattagtaattaatgaagcaacattgaaattctaactctagctgtctttggattctaattaactcagcatcaatttctcacctcagactacagtgaatttttatttcctatcagctgaaatatttcacagatggaagctcatgtttcagttttaatgactgccttgaataaacaagttgttgccacttgtttcaaacaaaagcctaaaaataatctacattcaattttaggctccattgactaatatggtgttgcttttggaagtactgtatatcctcacatggaagccaaattgttaaattatttgaaggacacaccactgtacagaaagtagtgtttcaaatataaatcgaagaacaaagagtgctccaaaaaataggtcattcttttattttcataaagtatctaaactgtactaacattcagtgttgtgtttcattctaaatttgcagctgaaataaatttatttgcgatagcagaaatatcttattattcatcctcagaaataaaggatttgaagggatagagattatatgataaatttatagaagactttcagaatttgaatgcattttgtttagtgttatgaaatgacaatagaaaaaagtctcgacttcaattaaaagttacacaaacaaacaaatctacaggcatgtctttatataccatc

SEQ ID NO: 1479 - DNA, 354 bp, Homo sapiens
ctgggttctatatttatggtgatgatgtgaatttttatgccctttaaattaagtattgttctttttaatgtcatacctaaaaaggaaatgtagggataaatttttataatgtgtcattttcataatcagtttggttttattcaggatccacaaagatgtcagatgactgttattgaaattgcttatcttaaaggtcacagacaagcattttattaatatggagccactagtataatatgttaaaatctttgttttattagctcattttaaaacacaatttccattcaatttaatgaaactgtatcaggtttcatggtttcaaagacagacttaaataggattcaacacccccgt

SEQ ID NO: 1480 - DNA, 1741 bp, Homo sapiens
gaaaaatggaatacactgatctactactgatgtcttctttcagctttgatctaaagatgtattttattaaaactataatttaaatgtaccatgaaaaatatgcagtaaaaattagttgttttctaagctagagtaggatttgtcttacaattattgtgctatgtagtttttgttttaaaaattccaatggtgtgctgctttctttggacattttattttcaattctataagagggatagatgacattgttctagaaacacatatacatcattaagagtgaatctctaaaaccaggatataaattatgctttatttctctgagaaaatcaaacaaatggaagctgttcacacctccccttctttaagcattatctaaattaatttttacttgcataatgttcttagaaaaaaaaacagaacatttaagcaggaaaaaaggaagaaacaagttgatttttaagtgcattttactataatgaatcaatgaagggaaaaggaactgcatatttcatgaaaataataagcattgtcttaatatactgttaatagaaaatgtgtcttaattctgtgcttgaatccctgcatgatatttgagactaagatctctcttatgattctaccaagaattatatctgtgtcacttaatttttttaaaagagagagatcaataactattcagagcaacatgttaaaggcaaagtttccaatcatttacatctgtatcaggtgcctcttacctttccttatttaagacaattatttgtacaagaaacacatgactcttttcatatcaatgggagggacttttctacaaagtattttccaggatgcaacccacatttaaacaatgtaaaattctttgtttcctgcaacaacttacaaaataaggtaaaagactaaaattcaagatttgcttccttcattgtcctaagacgattcgttgagaatcactgactttgagatatttaaaactttcagcattatactgtggtttcttttgcactgcactcacctattcaggactcctcccccaggttcctcatcatgcacaaaaatgcaaagaaaacatcttattagtaattaatgaagcaacattgaaattctaactctagctgtctttggattctaattaactcagcatcaatttctcacctcagactacagtgaatttttatttcctatcagctgaaatatttcacagatggaagctcatgtttcagttttaatgactgccttgaataaacaagttgttgccacttgtttcaaacaaaagcctaaaaataatctacattcaattttaggctccattgactaatatggtgttgcttttggaagtactgtatatcctcacatggaagccaaattgttaaattatttgaaggacacaccactgtacagaaagtagtgtttcaaatataaatcgaagaacaaagagtgctccaaaaaataggtcattcttttattttcataaagtatctaaactgtactaacattcagtgttgtgtttcattctaaatttgcagctgaaataaatttatttgcgatagcagaaatatcttattattcatcctcagaaataaaggatttgaagggatagagattatatgataaatttatagaagactttcagaatttgaatgcattttgtttagtgttatgaaatgacaatagaaaaaagtctcgacttcaattaaaagttacacaaacaaacaaatctacaggcatgtctttatataccatc

SEQ ID NO: 1481 - DNA, 354 bp, Homo sapiens; identical to SEQ ID NO: 1479

SEQ ID NO: 1482 - DNA, 3919 bp, Homo sapiens
cacttttagtacagcatttccaggaactatgtatcagcatataaaaatgcacagaaggattctcggacatctatctgctgtttactgtgtagcatttgataggacaggacatagaatctttacagtgagtaaaaattttaaacttgatttgatgtcatctagagtactttagtgtgcttcagaatcatctaggaaatcttagtttctgtttcccatcctcagagattttgactcagtaggtatggtgtgggtctcacgaatttgtatttttaataagtgcttcagctgaagataggactctgtgctgttttgaaagacagtgatttagagtagtcgttcttaaatgtgatatttaaggatgcttaaaaatagacatacctggccgggcgcggtggctcacgcctgtaatcccagcactttgggcggccgagacaggcggatcacgaggtcaggagatcgagaccatcctggctaacacggtgaaaccccatctctactaaaaatacagaaaaattagccgggtgtggtggtgggcgcctgtagtcccagctactcgggaggctgaggtaggagaatggcgtgaacctgggaggtggagcttgcagtgtgcagaaatcgccccactgctctccagcctgggcgacagagcgagattccgtctcaaaaaaaaaaaaaaaaaaaaaaaaaaaaacatagacatacctaacactttccctctagcacattctagacttactgaattagattacattgtaattaaatatatgtattaactgtaaaccccccaaaataaaaagctcctcagacctctacaagtgattcatgttcacattaatcactggttcaggaaaatgggttgattataaaataacccattagtgttcaagtaagtattaaaaacctatctgaaaaaatttggaatttatcattttaatgttttaagcgtaagttaggagaggtgagaagtttaactttcattttgtgggtgtaaaattcaagagtagataatcaaatgtttcttgaatgggtgctggctagtactgtaaacttgagactgtgttcgtgaggaggctattcccaccacttttgtttgtttttgggattgccacttagtcctgtttctcacactatgaagtatagatctgttccaacattcatcacattcatcacattatatagcttgatgtgaatagactttttttttttttttttgagacggagtctcactctgtcacctaggctggagtgcagtggcgcaatctccgctcactgcaagctctgtctcctgggttcacacaattctcctgcctcagcctcttcagtagttgggactacaggtgccagccaccacgcccggctaattttttgtattttttagtagaaaggtttcactgccttagccaggatggtctcgatctcctgaccttgtgatccgcccacctgggcctcccaaagtgttgggattacaggcgtgagccactgtgcctggcctagactaacatttaaccattgttagttgatataagagagccgtgaactttgagttggacttactactttgcagagaacttgggggaaaatagtattggtaatggagtctgacccgtagaaatgataactcggcagtatctttatgtagactgtctttgccttaaagaaaaatactattattccataggtgttctgaccatagtcataatttattacataaataagagagtattctatagttggaaagagttaaagttaatttggatggcatataaaaggtattcttttaatatttaaaagatttgctgtactaacattaatttttggatatattttttcttagggttcagatgactgtttggtaaagatttggtcaacacataatggccgcttgttatctacattaagaggtcattctgcagaaatttcagatatggcagtaaactatgagaatacaatgattgctgcggggagctgtgataaaattattagagtgtggtgcttgagaacttgtgccccagttgctgtgctccaaggacacacaggatcaattacatctttacaggtaaacttgtagcttagtgggcacattcctatatgtattttcacctttttctttaaaacagtttctttggaattgagaaatagtaagatgtgtattagttatgttttaagtaagagaagtgataatcattcatacaaatcatacaaatcatggaaggctgatgaaatgaagatctaatgcatatttacatgaaggcttattgatattttggggtttatggttgaactggatgagtgtcaattagaaactggtgatagattaattatttttcaactttaaaacttgtggattttgctaagttgatttttttttttttttgagactgagtcttgttctgttgcccaggctggagtgcagtggtgtgatctcagctcgctgcaacctctgcctcctgggttcaagcgattcttgtgcctcagcctcccgagtagctagaattacaggtgtccaccaccacacccggctaatttttgtatttttagtagagacagggtttcaccatgttgggcaggctggtctcgaactcctgaccaagtaacctgcccggctcagcctcccaaagtgctgggattacaggcgtgagccaccgtgccgcttagttgatttaatttaccaaaatatttaaagtttttttcacaataagcagaggataattttgaacctatacagagtagacagaattgtataaacccctatgtatctgtcaacccatggccaattctttcctaactgcttcatcttgtacctaaagcgaatcctaggttttatataatttcttctgcaaatatttcattctgtatttctaaaagataaggattcccctccccactttttttcatagtgacggttatgatggaaggaaaagattcctttttaaaaaaactgcaacaccattatcacactatttattgatgttcaagtttccagttgtctcataatggtattttatttaggttgtttgaatcaggagcaaaacgaagcctgcatgttacaattggttgctgtagaataaaagaaacttaaaatataaatttcacctatctatgcagtttaaaaaaaattcgcttgcagtttcttcgttgaaggacctaggttatctatagtttccccacagtttggatgttgcccattgtatcctgttggagtagtttaatatgttcctctgtatttctgttaagttggttattggatgtagagcagtggttctctttaatgtgcatgagaatcacctggagggcttgattaaaacattgttaggcactactcccaaagtttctgatttcaaaacgtctggggcgagggtatgagtatttcatcactgatagagaattgatcatcttgggatgtaagttcttccatcagaaggcacaaaatgtctagtgttttttgtattactcactgatgatcattgccttacatccgttagttattagggacagaaaatgttactcttactagtgcacggttcttggctgtcagtgtaacagaaattaataggaggctaggcagacttcccagacaagatttattaagacttatgctgagatttattaagacttgtgcctagcgatggctcatgcctataatcccagcactttagggaggctgaggtgggaggatcacttgagctcacaggtttgagacccggcctgggcaacttagtgagacccccccccccacccccacccaccccccacaaaaaatagtttggcaaggtagcacacgcctgtagtctcggtactcctgaggttgagggaggattgcttgagccaggaggttgaggctgcagtgagccgttatcgcaccagtgcattccagcctgggtgacaaagtgagactgcctcaaaaaataaaaataaaaaa

SEQ ID NO: 1483 - DNA, 3919 bp, Homo sapiens
cacttttagtacagcatttccaggaactatgtatcagcatataaaaatgcacagaaggattctcggacatctatctgctgtttactgtgtagcatttgataggacaggacatagaatctttacagtgagtaaaaattttaaacttgatttgatgtcatctagagtactttagtgtgcttcagaatcatctaggaaatcttagtttctgtttcccatcctcagagattttgactcagtaggtatggtgtgggtctcacgaatttgtatttttaataagtgcttcagctgaagataggactctgtgctgttttgaaagacagtgatttagagtagtcgttcttaaatgtgatatttaaggatgcttaaaaatagacatacctggccgggcgcggtggctcacgcctgtaatcccagcactttgggcggccgagacaggcggatcacgaggtcaggagatcgagaccatcctggctaacacggtgaaaccccatctctactaaaaatacagaaaaattagccgggtgtggtggtgggcgcctgtagtcccagctactcgggaggctgaggtaggagaatggcgtgaacctgggaggtggagcttgcagtgtgcagaaatcgccccactgctctccagcctgggcgacagagcgagattccgtctccaaaaaaaaaaaaaaaaaaaaaaaaaaaacatagacatacctaacactttccctctagcacattctagacttactgaattagattacattgtaattaaatatatgtattaactgtaaaccccccaaaataaaaagctcctcagacctctacaagtgattcatgttcacattaatcactggttcaggaaaatgggttgattataaaataacccattagtgttcaagtaagtattaaaaacctatctgaaaaaatttggaatttatcattttaatgttttaagcgtaagttaggagaggtgagaagtttaactttcattttgtgggtgtaaaattcaagagtagataatcaaatgtttcttgaatgggtgctggctagtactgtaaacttgagactgtgttcgtgaggaggctattcccaccacttttgtttgtttttgggattgccacttagtcctgtttctcacactatgaagtatagatctgttccaacattcatcacattcatcacattatatagcttgatgtgaatagactttttttttttttttttgagacggagtctcactctgtcacctaggctggagtgcagtggcgcaatctccgctcactgcaagctctgtctcctgggttcacacaattctcctgcctcagcctcttcagtagttgggactacaggtgccagccaccacgcccggctaattttttgtattttttagtagaaaggtttcactgccttagccaggatggtctcgatctcctgaccttgtgatccgcccacctgggcctcccaaagtgttgggattacaggcgtgagccactgtgcctggcctagactaacatttaaccattgttagttgatataagagagccgtgaactttgagttggacttactactttgcagagaacttgggggaaaatagtattggtaatggagtctgacccgtagaaatgataactcggcagtatctttatgtagactgtctttgccttaaagaaaaatactattattccataggtgttctgaccatagtcataatttattacataaataagagagtattctatagttggaaagagttaaagttaatttggatggcatataaaaggtattcttttaatatttaaaagatttgctgtactaacattaatttttggatatattttttcttagggttcagatgactgtttggtaaagatttggtcaacacataatggccgcttgttatctacattaagaggtcattctgcagaaatttcagatatggcagtaaactatgagaatacaatgattgctgcggggagctgtgataaaattattagagtgtggtgcttgagaacttgtgccccagttgctgtgctccaaggacacacaggatcaattacatctttacaggtaaacttgtagcttagtgggcacattcctatatgtattttcacctttttctttaaaacagtttctttggaattgagaaatagtaagatgtgtattagttatgttttaagtaagagaagtgataatcattcatacaaatcatacaaatcatggaaggctgatgaaatgaagatctaatgcatatttacatgaaggcttattgatattttggggtttatggttgaactggatgagtgtcaattagaaactggtgatagattaattatttttcaactttaaaacttgtggattttgctaagttgatttttttttttttttgagactgagtcttgttctgttgcccaggctggagtgcagtggtgtgatctcagctcgctgcaacctctgcctcctgggttcaagcgattcttgtgcctcagcctcccgagtagctagaattacaggtgtccaccaccacacccggctaatttttgtatttttagtagagacagggtttcaccatgttgggcaggctggtctcgaactcctgaccaagtaacctgcccggctcagcctcccaaagtgctgggattacaggcgtgagccaccgtgccgcttagttgatttaatttaccaaaatatttaaagtttttttcacaataagcagaggataattttgaacctatacagagtagacagaattgtataaacccctatgtatctgtcaacccatggccaattctttcctaactgcttcatcttgtacctaaagcgaatcctaggttttatataatttcttctgcaaatatttcattctgtatttctaaaagataaggattcccctccccactttttttcatagtgacggttatgatggaaggaaaagattcctttttaaaaaaactgcaacaccattatcacactatttattgatgttcaagtttccagttgtctcataatggtattttatttaggttgtttgaatcaggagcaaaacgaagcctgcatgttacaattggttgctgtagaataaaagaaacttaaaatataaatttcacctatctatgcagtttaaaaaaaattcgcttgcagtttcttcgttgaaggacctaggttatctatagtttccccacagtttggatgttgcccattgtatcctgttggagtagtttaatatgttcctctgtatttctgttaagttggttattggatgtagagcagtggttctctttaatgtgcatgagaatcacctggagggcttgattaaaacattgttaggcactactcccaaagtttctgatttcaaaacgtctggggcgagggtatgagtatttcatcactgatagagaattgatcatcttgggatgtaagttcttccatcagaaggcacaaaatgtctagtgttttttgtattactcactgatgatcattgccttacatccgttagttattagggacagaaaatgttactcttactagtgcacggttcttggctgtcagtgtaacagaaattaataggaggctaggcagacttcccagacaagatttattaagacttatgctgagatttattaagacttgtgcctagcgatggctcatgcctataatcccagcactttagggaggctgaggtgggaggatcacttgagctcacaggtttgagacccggcctgggcaacttagtgagacccccccccccacccccacccaccccccacaaaaaatagtttggcaaggtagcacacgcctgtagtctcggtactcctgaggttgagggaggattgcttgagccaggaggttgaggctgcagtgagccgttatcgcaccagtgcattccagcctgggtgacaaagtgagactgcctcaaaaaataaaaataaaaaa

SEQ ID NO: 1484 - DNA, 237 bp, Homo sapiens
ctggtcacttaaatagatttggtgtgaaattttatgataaaaggtgacttttgttctagtcagtattctcaaagaaaagagagtgagtagctattttgggatgaagatagttataactgagatagcggtttttgtttttgttttttgtttttggcccaggcggagtgctgtggtgcagtcatggctcactgtaacctcagcctggggtcaaggtctgcccatctcaacctctcgagt

SEQ ID NO: 1485 - DNA, 302 bp, Homo sapiens
ttaaagactgcaggcacacagtttggaagggctctgcctttgctgctcttcatagaggaagacctcctgaaatgccagtgaattatggttccccaccaaatcttggtaagtaaggttggcctttgagatgcctgaaataattgtttttaaatttctcaacaacctttataaatgctgtattaaaatttaaaaggaaatactggttgaaatgttgttttaatagtaataagtatcaaatgtcaaattattgttaaaataattactaaaaataaaattaataaaaaatctttttatagtaagaa

SEQ ID NO: 1486 - DNA, 237 bp, Homo sapiens; identical to SEQ ID NO: 1484

SEQ ID NO: 1487 - DNA, 302 bp, Homo sapiens; identical to SEQ ID NO: 1485

SEQ ID NO: 1488 - DNA, 1798 bp, Homo sapiens
cctgctgaggacatgaggacccgtctttttgcagtgccaggcagggtggccaaagaggactggactctggacctggagccccgtggtccagttcacattcaccccacaagagtttcaggaggcctcccacggtgcctgtgctgggtggcggtggtggtgccaagaggaatggaatgtcctgggctccttcaggagctctctacccaggggcaaggagagcccagagagaagcgccctggtctcttgagcttcctgatctgctcctgtcccccgctctcctccactcccttgcctttccctaggttgtcccctccctgggcttttgtgtgttttgggagatgtcacctaaccaggacattgatattcaatcccatcccccttcctcccaccctgccccactttgatttaatcctttggctgtgggctgaggcctcccagggaagctgggtggggtgggtgttgagaccccctcagaccagcacagagacctgtccttgtgcagtctgcaccctgcactccctcccttgcctgtagatgttctggatgacagtagaggaaatggacaaggtcagtttgaatatcccagaacacagtgctctgtctcctcccaccagtccagttagcttcccttctggaccaatagacgaggggagaccccatggatcctctggctgggaagccactgaccaggtggccagggggcagggtgggaagaggggttaaggtgcagtgatgatggcctgttttggagtgtgtctgagactgggattgcatttggggtttcccgtgtgcttgggatgctagagggtcacctgcaggaggcctggggccggcgagaaatctcctgtgatgccctgtgaaatggcttgtctcctcccccatcagggcccaccgaaagctcaggggagcacagaagcccatggaagcccagggagatgtccctggggcagacactaaggcaggtgttgaagacaagctgcttgtcaagaagcatttcccggcaagagaggggcaagtctggggctccaactgggtacagcctgggtgcagttataagcccctttggcttacttggtagaagatggctacttggatgtacctcacttaaagatgttttgtaccacactaggtctctgggcccttgtgcttcctgtgggtggggtgagggccaaaggctatggtttcctgcctccaggagaatggagagaaagggcttccaggcccctccaagcctggggaaggacgtggcatccaagctgagccagagggaactgctgctgtcctcccttcatttctgtggaccttggaggctttggctttgtggcagggcctccccaggcagctctgggacctaggagtttgcttctgatagggtcagctttcccatttcccttcaatgcttgggaaccttctcccttagcttcacacttgccgtttcaagccctgctgggaccttgtggcttggctggaatccaggactgtattttcatggagaagaacctgcagattcttccatcctcagctggccatggcccacagctctgcatctgcatctgagcttctcaagactcctggagcatgaggggaatggggcggggccactgctctgtgctgacgggctccgtctcggagattcttgtcctgttttttttctgttgtttttttttggctggtgctggggacaagcctgtgcctgccaaagctcccaggccaagtttgggggctggtgtttggggttgggtttggggttcaggatgctgcagtctgtgcaataataaacccgcatctgctcacgggc

SEQ ID NO: 1489 - DNA, 1186 bp, Homo sapiens
gacgtgggtccttcccatctgtgtccttgttctcacgatccttgaggggcagctgaagggcttcagtttgagtgggggctgaaagaccatagagcttctacagtggagtttctaaagcaaacttccagaaacttctatgagtagatgacaatagaatcaagagcctgccctttgaggtggagtccccccagcctccaatgctagcccagccactttcttcgcttctctgagcctcagttttctcatctataaaatggggataattacagagcctacctcctggtagtgaggattacattagatgttgaggctgtagaaagcagtggagaaatggagacgagtgttgttatcacgctatggtgctgttagctctgctacaagccctcttgcgttttggtagaggatcccagggaccccaaagggatggaggtgattcagataccagttgtttagtcagaatatctcaatcagtgggggagcctgaggggatcgccacattccacagaggcttagagcagagggacttgcccaaggtcacgcacacagcaagttggtggcaggaaagcagttctcttgactttttaggaataagtactgcccatgaagttactctcacagccggtggttcccagcgagggggttggagaagaaggtccctcaaccaacagtaggctcgagttcaggcacaccctgtcctcaggagcctggctcccctacccaacccagccctatcactgatgggccatgtgctccctcactccctctttctgtgcctcagtttcctcttctgctgaggagactctaatccctgccccatggtcttcctcataggcaatgcagttgtgaggctcaaatgagatagattatggtgataaagaggttttaagctgggcatggtggctcacacctataattccagcacgttagaggaggctgaggcaggtggatcacttgaggtcaggagtttgagaccagcctggccaacatggcaaaaccccatctctactaaaaaagaaaatacaaaaattagccaagtgtggtggcgcgtacctgtaaacccagctagttgggagactgaggcaggagaagcacttgaaccctggaggcggaggttgcagtgagccaagatcaagccactgcactccagcctgggtgacagagcaagactccatctggaaaaaaaaaa

SEQ ID NO: 1490 - DNA, 950 bp, Homo sapiens
tggtgagcaggaaggcgaagtagatatggaaacagaaatgatactaatatcggtgattccttccttttttcctgtgataagtgctgtgcagacaacatatgagcagtgctgataaatgtaaatgtattgttcatagctcattaagaatcagtttcagaaagagatgtctgcttatttggctgcttgaagaatccctgtcaaacagtccttttcaggaagtacaagaggctgtctctatttgtgacctcaggaatggctgtgacagtgtcgtgaccagtccttttcctgtggcacagatctgaactttgtgtgcagaaaaatcttggcttcaagtgagccaagatgccccctgagcatcagcatcacaacttcatcctcctatcttgaagttcatgttatagtgactttaatgaaatcatagagcactgtttcttcgtgtaacaatgacgagggagagcaaaaaactttattgaaaaataaaaaggcaggtaatttagatgaaaatatgttacccatgaggttttgtttttgctttttgtttttgtttttgagaaacagaatctcgctctgtcgtccaggctggagtgcagcggcatgatcttggctcactgcaacctccgcctcccgggttcaagcgattctcctcagcttcccaagtagctggtactacaggcatgcgccaccacaaccagctaatttttgtatttttagtagagatggggtttcactatacgttggccaggctggtctcaaactcctgacctaaggtgatccttctgccttgggctcccaaagtgctgggattacaggcatgagccaccttgcctggccctacccatgagccttgactaaaacattcttctatctgtagaaaagcccaaaagaacttttccagattcaaaaaacttggcactttgtaatggtaatgtttacattaagtaaaaaaaaaa

SEQ ID NO: 1491 - DNA, 112 bp, Homo sapiens
aggctgagacaagagaatcgcttgcacctgggaggcggaggtttcagtgagctgagatcgcaccattgcactccagcctgggcaacaagagcgaaactccatctaaaaaaaa

SEQ ID NO: 1492 - DNA, 4469 bp, Homo sapiens
ggatattcagcatcctctcccagagcaaaaagcgactccacatagaagactactctgtttctcagacaacacttgaccaagtaagctttgagtgtcaaaacagatttacttctcagggtgtggattcctgccccgacactcccgcccataggtccaagagcagtttgtatcttgaattggtgcttgaattcctgatctactattcctagctatgctttttactaaacctctctgaacctgaaaagggagatgatgcctatgtactctataggattattgtgagaatttactgtaataataaccataaaaactaccatttagtgagcacctaccatgggccaggcattttacttggtgcctaatcctatttaaattagataaaaaagtaccaaataggtcctgacacttaagaagtactcagtaaatattttcttccctcttccctttaatcaagaccgtatgtgccaaagtaaatggatgactgagcagttggtgatgtaggggtggggggcgatatagaaagtcagtttttggccgggcgtggtggctcatgcctgtaatcccagcactttgggaggctgaggagcaggcagatcatgaggtcaggagatccagataatcctggccaacagggtgaaaccccgtctctactaaaaatacaaaaattagctgggcatggtggtgcgcacttgtagtcccagctacttgcgaggctgaggcaggagaattgctcgaacccaggaggtggaggttacagtgagccaaggtctcgccactgcactccagcctggggacagagcaagaccccatttcaaggggggaaaaaaagtctatttttaagttgttattgcttttttcaagtattcttccctccttcacacacagttttctagttaatccatttatgtaattctgtatgctcctacttgacctaatttcaacatctggaaaaatagaactagaataaagaatgagcaagttgagtggtatttataaaggtccatcttaatcttttaacaggtatttgtgaactttgccaaggaccaaagtgatgatgaccacttaaaagacctctcattacacaaaaaccagacagtagtggacgttgcagttctcacatcttttctacaggatgagaaagtgaaagaaagctatgtatgaagaatcctgttcatacggggtggctgaaagtaaagaggaactagactttcctttgcaccatgtgaagtgttgtggagaaaagagccagaagttgatgtgggaagaagtaaactggatactgtactgatactattcaatgcaatgcaattcaatgcaatgaaaacaaaattccattacaggggcagtgcctttgtagcctatgtcttgtatggctctcaagtgaaagacttgaatttagttttttacctatacctatgtgaaactctattatggaacccaatggacatatgggtttgaactcacacttttttttttttttttgttcctgtgtattctcattggggttgcaacaataattcatcaagtaatcatggccagcgattattgatcaaaatcaaaaggtaatgcacatcctcattcactaagccatgccatgcccaggagactggtttcccggtgacacatccattgctggcaatgagtgtgccagagttattagtgccaagtttttcagaaagtttgaagcaccatggtgtgtcatgctcacttttgtgaaagctgctctgctcagagtctatcaacattgaatatcagttgacagaatggtgccatgcgtggctaacatcctgctttgattccctctgataagctgttctggtggcagtaacatgcaacaaaaatgtgggtgtctccaggcacgggaaacttggttccattgttatattgtcctatgcttcgagccatgggtctacagggtcatccttatgagactcttaaatatacttagatcctggtaagaggcaaagaatcaacagccaaactgctggggctgcaagctgctgaagccagggcatgggattaaagagattgtgcgttcaaacctagggaagcctgtgcccatttgtcctgactgtctgctaacatggtacactgcatctcaagatgtttatctgacacaagtgtattatttctggctttttgaattaatctagaaaatgaaaagatggagttgtattttgacaaaaatgtttgtactttttaatgttatttggaattttaagttctatcagtgacttctgaatccttagaatggcctctttgtagaaccctgtggtatagaggagtatggccactgccccactattttattttcttatgtaagtttgcatatcagtcatgactagtgcctagaaagcaatgtgatggtcaggatctcatgacattatatttgagtttctttcagatcatttaggatactcttaatctcacttcatcaatcaaatattttttgagtgtatgctgtagctgaaagagtatgtacgtacgtataagactagagagatattaagtctcagtacacttcctgtgccatgttattcagctcactggtttacaaatataggttgtcttgtggttgtaggagcccactgtaacaatactgggcagcctttttttttttttttttaattgcaacaatgcaaaagccaagaaagtataagggtcacaagtctaaacaatgaattcttcaacagggaaaacagctagcttgaaaacttgctgaaaaacacaacttgtgtttatggcatttagtaccttcaaataattggctttgcagatattggataccccattaaatctgacagtctcaaatttttcatctcttcaatcactagtcaagaaaaatataaaaacaacaaatacttccatatggagcatttttcagagttttctaacccagtcttatttttctagtcagtaaacatttgtaaaaatactgtttcactaatacttactgttaactgtcttgagagaaaagaaaaatatgagagaactattgtttggggaagttcaagtgatctttcaatatcattactaacttcttccactttttccagaatttgaatattaacgctaaaggtgtaagacttcagatttcaaattaatctttctatattttttaaatttacagaatattatataacccactgctgaaaaagaaaaaaatgattgttttagaagttaaagtcaatattgattttaaatataagtaatgaaggcatatttccaataactagtgatatggcatcgttgcattttacagtatcttcaaaaatacagaatttatagaataatttctcctcatttaatatttttcaaaatcaaagttatggtttcctcattttactaaaatcgtattctaattcttcattatagtaaatctatgagcaactccttacttcggttcctctgatttcaaggccatattttaaaaaatcaaaaggcactgtgaactattttgaagaaaacacaacattttaatacagattgaaaggacctcttctgaagctagaaacaatctatagttatacatcttcattaatactgtgttaccttttaaaatagtaattttttacattttcctgtgtaaacctaattgtggtagaaatttttaccaactctatactcaatcaagcaaaatttctgtatattccctgtggaatgtacctatgtgagtttcagaaattctcaaaatacgtgttcaaaaatttctgcttttgcatctttgggacacctcagaaaacttattaacaactgtgaatatgagaaatacagaagaaaataataagccctctatacataaatgcccagcacaattcattgttaaaaaacaaccaaacctcacactactgtatttcattatctgtactgaaagcaaatgctttgtgactattaaatgttgcacatcattcattcactgtatagtaatcattgactaaagccatttgtctgtgttttcttcttgtggttgtatatatcaggtaaaatattttccaaagagccatgtgtcatgtaatactgaaccactttgatattgagacattaatttgtacccttgttattatctactagtaataatgtaatactgtagaaatattgctctaattcttttcaaaattgttgcatcccccttagaatgtttctatttccataaggatttaggtatgctattatcccttcttataccctaagatgaagctgtttgtgtgctctttgttcatcattggccctcattccaagcactttacgctgtctgtaatgcgatctatttttgcactggaatatctgagaaattgaacaactagacaaaagtttcacacagatttctagttaaatcatttcataaaagaaaaaagaaaaaaaattttgtatgtcaataactttatatgaagtattaaaatgcatatttctatgttgtaatataatgagtcacaaaataaagctgtgacagttctgttggtctacagaaa

SEQ ID NO: 1493 - DNA, 209 bp, Homo sapiens
atctcggctcactgcaagctccgcctcccgggttcacgccattctcctgcctcagcctcctcagtagctgggactacaggcgcccgccaccacgcctggctaatttttttgtattttttagtagagacggggtttcaccgtgttagccgggatggtctcgatctcctgacctggtgatccgcctgcctcggcctcccaaagtgctgggt

SEQ ID NO: 1494 - DNA, 159 bp, Homo sapiens
atctcggctcactgcaagctctgcctcccgggttcacgccattctcctgcctcagcctcccgagtagctgggactacaggcacccgccaccacgcctggctaatttttgtatttttagtagacatggggtttcactgtgttagccaggatggtcttgat

SEQ ID NO: 1495 - DNA, 184 bp, Homo sapiens
aagctctgcctcctgggttcacgccattctcctgcctcagcctcccgagtagctgggactacaggcgcccgccaccacgcctggctaattttttgtatttttagtagagacagagtttcaccatgttagccaggatggtctcaatctcctgaccttgtgatccgcccaccttggcctcccaaag

SEQ ID NO: 1496 - DNA, 232 bp, Homo sapiens
cagtggcgcgatctcggctcactgcaagctccgcctcccgggttcacgccattctcctgcctcagcctcctgagtagctgggactacaggcacccgccaccacgcctggctaattttttgtatttttagtagagacggggtttcgccgtgttagccaggatggtctcaatctcctgacctcgtgatccgcccgcctcggcctcctaaagtgttgggattgcaggcatgagcc

SEQ ID NO: 1497 - DNA, 104 bp, Homo sapiens
cggctcactgcaagctctgcctcccgggttcacgccattctcctgcctcagcctcccgagtagctgggactacaggcgcccgccaccatgcctggctaattttt

SEQ ID NO: 1498 - DNA, 117 bp, Homo sapiens
tcagctcactgcaagctccgcctcctaggttcacgccattctcctgcctcagcctcctgagtagctgggactacaggtgcctgccaccacgcctggctaattttttgtattttttag

SEQ ID NO: 1499 - DNA, 161 bp, Homo sapiens
ctcactgcaagctccgcctcccgggttcacgccattctcctgcctcagcctcccgagtagctgggactacaggcgcccgccaccacgcctttctaaattttgtatttttagtagagacgggatttcaccatgttagccaggatggtctcgatctcctgacc

SEQ ID NO: 1500 - DNA, 6833 bp, Homo sapiens
tgagactgcagttcctgcgacgcccctgcagcagcagcagcgtggtcagagcgagcttctgagcggtggtgggttccatgtgatggtggagtaggagacaggtctccgcggtcagtggcgggggcgtggaccccaccgggaaccctccctgctccttccctgcctctccctgttttcgtgcccgcacttcttcgtgggcatctgggcccgagtcctccgcttgggggcggttgtgcggtcctggctactgcagcgtccgcaccccggccgggaaggctatgccaatgtccgacccgcgtccagcgtataggagcgccctggcccacagctggcggtaaaacgcgggacctgggtccctcggagccccaggggcctctgagctggagtctaggattatttttgatgcctcagcacctttaaaaagagacctcgctagagcagggggcatctgtattttcagttctttgaggagtctccagctatttagctgttttccatggtgtgtatcctaattttcatttccacctacagtgtatgagtttccctttctccaaaaccacacccgcattcctactatttttggtttggggtttgttttgtttttgtttttgttttgagacggagtcttgctctgtcttacaggctggagtgcagtggcgccatctcggccgactgcaaccgctgcctggttttaagcaagtctcctgtctcagcctccagagtagctgggactacaggcgccgccaccatgcccagctcatttttgtatttttagtagagatggggtttcacgatattggtcaggctggtctcaaactcctgacctcaggtgacccacctgcctcagcctcgcaaagtgcagagattacaggcatgagacaccgttcccagcccctcctatttttttaaaaaaatcaaggaatattcgataagtgtgagattatctgtgtgtggttttgaattacagttttctaatgaatagttgattttgaggaccttatctcttatttgttgttcgattttatggctgtgcagaattgtctgttcaggttctttgcaaaatattagattggatgcttttgctactttgtagtgttttttgtgtacatattagatgacaactcctcgtgaattacaagattgcctgaaatttttgcctaatctataggatgcttttttaattggaaagtagttttctttgatgtgcagaaacttttcatgttgatgtagtcaacatgatatttatttttgcgtttcatgcatgtaattttcgtcacccatataagaaaataatatgtcagtgacaaagcatttaattgtcaatgaggtttttcttccagggtgtttattttcctctttgcaaaggtgagcagagattcaagtgacccaaaatatatgctcatcctgtgttttagttaaaaacattttgtagtttatggtcttttgttttgccttcaatttgggggagtgggtgttcattttcatacatcgtgtaaaataaggtcctatttctcgcttctgcatctggatatcatttttgtcaaaggtattcattctctgccttccacattgcagtgttctttatcaaagtcagttgattgtgtccatatttgtgttgatcatgtttttgtcctccctgtttttgtccatagtttatgcaagtatcatatatcagctgtataactacaacttggcagtgtaatttgatattaaggattgtgggtcttcactttgtatttctcaggattcctttagatattcattgcttttgtggttccctgtgatttttagcaatacgtatttatttctgttaactttttttcacaacataaaggtccataattaggggtacattttcatacatacagattgggtaatgatcaaatcagggtacttaggatctctatttgctcatccaggttttttttttttttgtggggagaacattcaaaattctcccttcttactctagaaaaatatgatattgttaactccagtcaccaggctgaggaggagaacctcagatttgttcctttaatgttaagataactttgtttccataatcaatccttccccattccccctctatctcccaaactctggtaaccaatattgtgctttttacttcattaagataaacatcttaagatttcacatgagtggtatcatgcagtgtttttctaggcctagctccttacatttaacataatgttttccaggttcatctgcgttgctctaaatgggactgtttcattattttgatggctgaagaatatttcctagtgtatgtatatgagagtttcttgatctctttatctgtggatgaacaggtaggttgaatttacacccagtaatgggactgctagatggaatggtatttctttttttcctattctttgcaagacctctaactgttttttatagtgttaatactaatttatgtttgcacaaacagttcccctttctggcaattcataccaggaattgtctttttaaatattttgatctttttgtaatgttcattctattggagtgagataagatctgagtgtggttttgatctgcatttttctcatgagtagtaatgttaaccacgtttttgtagacattcggtcagtttcctgtcttctttggaaaaatatctaatccggttatttgcccagtttttgtctggcaattgttctgttgttttgttatttttttgccagctggtagtatgactggcttgtaccttttcaaaaataatcccttatcccaaacttgtaatttttagtgtgcctttttattttgtttattgtttcctttgttggtcacaaatgcttcagcttgacgtggtcccacatgtgcataatttcttggtggctgtgctgttggttactaatcaagaaaaaacaaaatcactaccaaagcagtcccttgtcaataatttttttcccttgtatttttgtttactttttgtgaaccctgagcatacatccaagttgctctaaatatacgcacacccgaggttgtctttataggagctttatggttgcaagttttgtgtataatctttaatcattttgagttgattattgtgtatctagtaccataagggtcctgtattacccttttgcatatggatatctagtttcggaagtcttccctgttgtgtcattttggtggtgttttgaaaaatgtgttcattccatataaatttttgtttattattgagcacattcattttgctcactggtctgtgtttctctgtctatgccagtaacatatgggtttgttaactacggattttcatttaattagaactcagggaatgtgatgcatcccgtatggtttgtatttctcagaatagctttggaaattcagggtgtttcacatttccacataaattttggcattgtttctttatacttcctaaaacactatttgtcatatactaaatgtatacaattagaaggtacaaggaaggttttcatacatgtatatgttgaataatgataaaatcaggttatttagcatctcttcatctcatatagttattatttttggtaacaacattcagaatctttccttccagctactttgaaatatatgatacatttgtgttaaggctagtcacgctgctgtggaatagaaggccagaattgatcactatcatctgagagtaactttgtacccatcactgattccttccgagactgcctccacttccccagcagcctctggtaagccctattgaactttctacttctagaagataaagcttttttcagtctacatgtgtgagatcacgtggcatgggactttctctaccaggcttattctttggaccttgttcttcagatttcttcatgtggctgcagatggcaggatttcccaaaggtttatggctgcaacatattccgtggtgtatctgtacagcagtttcctcattcctgcagctgtgtttgaacaggtaggttggttctctaccttggccacagttaagagtgctttagtacccatgggaaggcagatagctctcttcaacctagggacttcaactgctttaaatgtggaaccagtggtggggctgttagctgacatggtagttgtactgtgaatttttttcagaaacctctagctgtttttcatagtgtgtatactaatttacatccccaccaatagcgtttaagaggttacctttctgtaagtctacactggatgtcaccttcaaaaattcgtgttttgtttttggtagtactcattctgagtggaatgagacagaatcttagtgtggttttcatggacatttttttgtgaggtttagtgatgttgagaaagttatttgagaaatccccacattgctttccatggtgtccgaactagtttgcatttccaccaacagcagaccagcatccctcctcctctgccttgctggtgttcattcttgtggactgtgtcataattgtcattcatcagaatgtgtgaaatactatctcatgggccttttgctttgcatttctctgatgattcctgaggtaaagaaatgtcttgtctgttggttgctgtaaaccttcttttgagatgcatgttttcatgccccttaccctttcttcattgagtttttgtttttctgatttatttgcttaatgtatttgaagtagattctggatattagacttcatcagatgcagatgtgggaacattttctcccattgtgtaggctgtctgtttactgtgttggtaatttcttctgctgtgcagcagctcttttgtatattaggccccacttgtcaataattgttttagttgcaattgcttttggggacttaggcacagccatgctctgccaaatcctctgtcaagaagggtatttccaagttctcttgcaggcttttcatagtttgaggtcttgcgtttacatcttcattcatcttgagttaatttctgtacagggtgagacacaggggcccactgtttttcttctgcaactggctagcagtttatcctggcaccatctattgagaggagggagtcctttctccaaagcttattttcgtggatttttttgaagatcagatggtgttaggggtgtgggtttacatctgggtcctctaatttgttccactgctctgtgtgaaatggggtccctagcttttcaatgaaattaaaaatcaggaagtgtgacacaaccaatgtagtttggacttctcaggattgctttagaaattcagggtgttttgtggtctgcatgaattttagcattgtgtatttacgtattttttaaaaggttggccatatagtaaaggtatacaatggggggagttagagtggggcattttggttaatgcagacatagaggaatgttaaaatcaggatatttagagtctctgttatcacaaagttgttaatttctttatggtgaaaacatttggaatcttcttttccagattttgtgaaaaagatgtgatgttttgttaacctctggtcactgtgctgtggaacagagaggaacaattcattcctctcatctaagtgtaattttggacctatttctgatccctgcccatacccctgcttccctccaatctctggaaaccactgttatgctctctagatctattgcaataaagccttttattttgggttctacatgagtgagatgtggcaatgtttttctttctctacctggtttaggtcatttaccatgcggtcctccaggttcaacagtatggctccaaatgatgaaatttcattctgattttctggctgaagactattctgtttgtgtatgtccaccacagttactttatcccttcatctgtggatgggcaggtaagtttattccttatcttggcgattgtgaatagtgctgcagtccacataggatggctgacatctcttgcataaactgatttctttggcactgaaagtatacttagtagtagaattgttagatgaagtggtagttgtaggtttaatttttggaggaacctcccactggtttctgtagtatgtatactaattaacattctcttttttttttttttttggatggagtctcgctctgttgcccaggctggagtgcagtggcatgatctcagctcactgcaagctctgcttcctgggttcatgccattctcctgcctcagcctcctgagtagctgggattacaggcacccgccaccacgcctggctaattttttgtatttttagtagagacggggtttcaccatgttagccaggatggtctcaatctcctgacctcgtgatctgccggcctcggcctcccaaagtgctgggattacaggcgtgagccaccgtgcccggctgtatactaattaacattcttaccaaacgagttcttctctggaaatttccaccagcatttgtgtcttttttaatatattttatcactttgataacatccatttgaattatagtgagatgatatatgtgttgttttgatttatatcttatggtttgtgatgttattcaagtttttaaaactcgttttcaatgttatgtcttttttgtagaaatgtctatttaggttttgtttggttattagtttctcttttgtgtttttgctagtaagtagtgttagttgcttagacattttgaagacagccttttatcagatatatgtttgttgaaacatttcttgtagaatgaaacatatatggaaatgttctgtgcaataaaaacagcagtggtaacacagatgtaggctctgagtgtctcactggagactgaagtccacagatatgcaacaaagcctttgtctccctgatgtttttgcctcctgctggtcatgtgctttcacacatcaagagaggacatttaacatttga

SEQ ID NO: 1501 - DNA, 489 bp, Homo sapiens
ctcgcctggccttaagcagcttttattcgtccatgtcatagaatcaatggaataaatatgtcattatcagttaccaagaagacaaaagatctagatttagttctagctctatctactcagctttgcaacctttaggaaattagtcacaaattgagacatcagtgattttaccggtaaaatgagaaagaaaaactgtatgattctctaatgcccattccagtttgcaaattaaatgattctatagctaaatttctaccacaaatctagaaagtatacatatttttacaaggtccagcagcacatataggcaaagataaaaattatcctagtgagataaagtatacaactatgttcattttaggacatgaaaaatctaaaaaaatatgagcttatattattttatttggctttaaccaataaaaactttagagttaataaattctaaagttggtatatgcaacaagccatttacttatcaatatataattt

SEQ ID NO: 1502 - DNA, 284 bp, Homo sapiens
ttttttgaaaagatcaacaaaattgatagaccgctagcaagactcataaagaagaaaagagagaagaatcaaatagacgcaataaaaaatgataaaggggatatcaccactgatcccacagaaatacaagctaccatcagagaatactacaaacacctctacacaagtacactagaaaatctagaaggaaatggataaattcctggacacatacaccctcccaagactaaaccaggaagaagctgaatctctgaatagaccaataacaggctctgaaattgagg

SEQ ID NO: 1503 - DNA, 186 bp, Homo sapiens
ttctgttcctgtgttagcttgctgaggatgatggcttccagcttcatccctgtccctgcagaggacttgatctcatacctttttatggctgtgtaatattccatgatgtacatgtagtacattttctttttccagtctatcattgatgggcatatgggttggttccaagtctttaccattgtgaat

SEQ ID NO: 1504 - DNA, 8125 bp, Homo sapiens
tgggagtgggcatctggctctccgtgtcccaaggcaactttgccaccttctcccccagcttcccttcgttgtctgcagccaacctggtcattgccataggcaccattgtcatggtgacgggcttcctcggctgcctgggggccatcaaggaaaacaagtgcctcctcctcagcgtaagttctgtccaaatccccagcccctccaactcctgatctccttgcacttggacccctgggacaggcaagacctggaatattagacacctgggtgtccaacctgagcccagggaaactgcttctagaacgttctaggcttgaccacacccctcctcctcatggttggttatgcctacccctggttgtccctcccactccctgattagtcagctcctttatgtccctgtcctagctatctgggtttcctcaggaggagctggcttctcccagacctgggaagccccacctaggcgccgcctgtccctgccttccacaccctccttgtcctcagccctgcccattaccacctacccatgcctggccctttcctttccagtttttcatcgtcctgttggtcatcctcctagcagagctgatcttactcatcctcttctttgtctacatggacaaggtaagccttaccagatgggagggggcatatggaatgtcactgcccttagagttgggccaagcaggccagggtcccttccctggccagaggaagagtgctggcaagcagcacctgtgcagaaaggaacatggaaccaagggttgggaaagctaccaaggaaagagcagatggaaggttttgatgggggcagcacggggcaggcaaatttggaggatgggagagttgactttgtatagttccaggaagtggaatcctctgcatgaccagagatggcagtgggctgcctctggcgctagtgagctccctctcactggaaggaattaagctacttggagaagggattcagacctcatcaggtggttgggctgggtgatttgagagcaaaccatgaaaaacaaggaggaactctctgggcgacgctggctgagcaggactgaggcacagggaagctctgtttcctgcactagagcccttgaggacgggcgctgctcctgggttcaggaggatggtgggtgaccccctgtaacctcgccaggctgggcagttcgcagtcaagagcgaggttggccgggatttcagtctcttggggcgtggcaggccctttggtaccatgcactccagaactgtgtaaggagcagttcttgaaatagctgcctgagccacactgaaagttagagacatcgttaggatgagaaagaataatcttttagttttgcactcgtgaaaaggaagaaagaacaattttgagagatttctctgtgccagccctgttcttggcccttttatgagaattgtttcccttaattctaacaacagcgccatgagtagatgctgctgttcaacatcgggtagaacagcggtgagggaggtgaaggtcacatgacctgtcttcctccctctagttcccagggtgtgttttgagaggggcagtctgtggggaagctgtgtagtggggggcgggggtggcagagtggcctgtgtgtgtggctggtcctgggatgggggagtggaggcacgtggtgtgtttttttgcctctgggtgttacagccctggccctgagtttagctctgctgggaggcggtgggtgcaccagggcctgctgtattctgaaactgggagtgtgtgcctaaccccgcacctctgttgggccagcagaggcccccaccccagtgggcagggccttccagaccagctgccttccctgccttcctcactcctcatctgtcacccaccatcctgggtgacctgaggtgggctggagagacgagctgcgtcctggttccaaccgtctcactgtgtccctccgcctggcaggtgaacgagaacgccaagaaggacctgaaggaaggcctgctgctgtaccacaccgagaacaacgtggggctgaagaacgcctggaacatcatccaggctgaggtgcgggctgggccgccctggtggggccaggcagggaggaggggtggcggccggtacttctagctgccttccccggtgacctggccgggcacctgtgctttctggattttagccgggagtggagtggtacccacgggggcatttgcctgaactgctgagtcagatgtgatacagcaaggtacagccagggagggatgaggatacaggaggggcaggcctgagagagctgtggctgagctttgggatgaatgactgaatttattttagcaacagatttgcctccatgatggggcttggcttaggtgaggaggccctggctctaggaggagaacaagtccatagtcccagatgctcccattttaagccctggggaggggccggcagggggttgggtggcagtcagcttgggacggtttacagaaagagcagaggtgctggtgggcaagcacagggctgagccaaggggcccagcccgaggggtgggctgcattgccctctcccgctctggtctccaggaaggagtgctcactcacttctccagtgggcccggctgaagcccaaagaagggacaagaagcaagccctttgtctcctcccttaactgcagggtggccacttttgcggggactggggttggcctgggcaggggaaggccctggggaggaaggggcgggccatggcatgtctgactgccccttccattcctgctggccagatgcgatgctgtggtgtcactgactacacagactggtacccagtgctgggggagaacacggttcccgaccgctgctgcatggagaactcccagggctgcgggcgcaacgccaccacgcctttgtggagaacggtgaggctggggatggaccgcttgggtccaagagcccgtgtgtggatgccccggcacggggagccctataggggaggctgggcccgggacactaagaggttggctgaatgtggcggtggggggctcacaaaaataaagccaaaagacaggtggaaaatggggggtggggctggacccacagttgggagagtcagagggcgaggggttgaatggggtctgaggctctgcagctggccttgcgggtggggcggaggctgcgccaagggatggggacagggctgaggccagggagggctgggaggtaagagtgaggacgaggtggaaggagagagtgagctgggggctgggctgcagggagcgcatgcttgggctgggaccctaacctcgtgggcctcgctccccagggctgctatgaaaaggtgaagatgtggttcgatgacaataagcacgtgctgggcacggtggggatgtgcatcctcatcatgcaggtaagaggggcgtccccagcagcctcacccaccctgctggcctcagccgcagagggaaggaagcacagagaagtgaaagcagtgttggtacacggcggagggtctggaattcatcacagctattcaagcttagcagctgtgcctgccaccgtttccgcagagctctgatatgagagcacgtgtctactcagcactgagagtggtgctcagggctgcctgtggccaggcccaggctgggatattgaagctggagtcaacccccgtgggttcccccagttctgcccaaaccttgagctcagagagccatgcaagacacacacggtgtcccccggtcaccatctttacagcctgtgcacatggcacactctctgtggtgaccgtgagaccacaccgggcttccttctgcctcctgcactcctctgggtccccggctcctttgaggattcaggagggaaggggcacaaacgagtagtgacgtggtcctgagcacacatcactggaaagacagccctgctgctgccaagacatcgcaccatgtgttccacaagcagacaagagaggcttgacaggagtcctttatttttctttttttaagagacagggtctcactttgttgctcaggctggagtgcggtggcgccgtcatagctcgctgcagccacaaactcctgggctcaagccatcgtcccacttcagcctctcaagtagctgggactacaggcatatacaccaccatacctgaatgatttacaacttttttccaaaaacagatggagtctccctctattgcccaggccgatctcaagccatcctcccaccttggcctcctaaagtgccaccgtgcccggctggcctgagtcctgaatgatccctgccacctcccactccccaccttggctcctgtgagcccccacgtagagccaggtcctccgtgcattccgtgcctgcagcgcccctctgagtaggcacacgtatgcatcctgcagaggttcgatggcttctggtctaacagccccacgaggctgagccagagttcacctgtgtgtgtctccagggtgacctctgttcacggttttcttcatgtcttcattccataagcattttcctggcacaccagtggccatccccgcttgctctaggtgccctgtgacatcccaagcctctcggggctgaggtcaggtccaggctgctgcagctcctgcctcaggcccctccccgtgtctttcagatcctgggcatggccttctccatgaccctcttccagcacatccaccggactggtaagaagtacgacgcatgagcgggctggccgggagtgcccaccccgccctgctgccctgtggagggaagaggattgagctttgtgtcgcctgcctgcgctctccagatatgacccctgcacccaccccccacagcctgccctaccccacctaccctgcctcagcctcggacttctcagtgggtggagtgccagggaggaggaggcacacggagacctggggctcggggcccctggattcctgcatctgcatatgcgtatttgccaaagacgacagggtgggctggggtgcgctctggaggaacccccggcactgatgggcttctgcccctgcccttcctcacactgacactttgtccccacatggggtggggagcagagtgcccgccccgtggagataccgccccagcgggggctgcgacatccatggccaccatggggcacctggcggggcgggggtctgccggcctctgggcaaggcccctggagcatctcgcccaggctttttataccttacaatgtaacttttttattttattttactctatgattattcaggaatattatctctcagataagtttagggttagatttctgatttgtaactttttactgtgttgatttctttaatggtttgactttttttccctgagggtgagggatgggtgggaagagaggacatctgtccagtctcaatcaggacagaccaccgtgcgacacccaggaggctctcggatggggcgcgcctgcgccctcagaacgtgtgggaaggagggggcgtggacaggacacgggaccttgccaggcctggtgtctgaggacaggagcctgggagaggcgggtggagcgtgaagcaggctggaggtgcccctgcacgggaggtggcgtttgctaaccaatcgagctggaaatgccagggcaggggggccccacggtgctgtggcagagctagaggggtccttagacttttcactgatgagcagttgttggttttttctttctcccttcctcccgctctctgctggcacgcgaggcttccccttccaccccatgtgggtattcccacaacaggttctgcacaccccagttatttcacagacattcctgctagaaactgtcagacaaatacctctctagttcggatgctgctcactttcccccttgcttctggaaggggaagcagtccttaggttttgctgtgctgggacagtggcaggggacccacaggggtgaggacccacggtcctccccgccagccttgctcagctgtgggttgccctgctgggaaggagggaatcacgtccacctgggtcccaagatcttcgcctccttccctggggccacggacatcagcagtgggttgggtggcgattatatcatctgtgatcccaaggagaagaaatacagaaaacccaagagaggtcagactggctcttgttaccggagccacgggaagaaagcagccggagtcacgcacgtgcagagctgggcatgggagagaaacgggctggggagtgaggccaggagtgggattcagctgcagcagggcgccccctccaaactgcagctggtctggcttactgttttgccgttcaaaaaggtcgcgaatccgtgggactgagcacggggacctcacccgctagccagcgtctgctgcacttgatcaggtggggccttggtgggcggctgcctttcctatacagtttgtcttgtcaccctggtttcccactggggccaggtctcttctccagcctccacctgcctgtctgatccaagagctgagacacggccacccagcaccagtcactcctctgttcaccttaagtaacacacaaaccgggaacaggaggacagaaccgttggcattatcaggattcgtgttttgtgggggtgggagtggagagtagggtggtcttgtgagttgtgcagggtgaagaccgcttccctgagacaggggcagtggtgctgatggaatgtgggggaggcccacatttgagcaaagctgccctgcccttgtcccctggcctggcttcctggtaaggagtttcagccgcctccgcaggaacccccaaagtgcagattccggagcagacacatccgggcggagagactcagcagacaagtgctgcagttgcacggtgggacccggggcctcgtgcgttttttgctgtgggtggggtgggtgggttggtttatgcctatcaatgcaatttttaatttttgttaatatcaacagcaaaagcctagtgcattgggagatgtgcaacctccctgaaaatcttttctgtttctggagtacttcaggggtggcctctggccccagagcctttgccacagtgctcccaccagcccccacctcatccgtctgtttgcagagcctcatctacaggtccccacgctgccttctttactcactctgcgcttggccgttttgttatttggcttagtctacattgggcggaagtctgtgtgcacagagtgggtgttccttcgagccccttccactcagagggccacacccagcgatgccagtgaaggtggcacagcctctcttcagtttctcctgactgtgatctcactggggtagaattcccctgagagaattccctcactcacggctccctttgccagagtcagttcaatcaggtctgatgtgagcaatttacacacttgtctcagaaagtccctcagggtttgtagaggactgcaggggggcatccgctgcagactcagcctttctctgcagccatcctgcagtgggggtgagcgggcacaggctgagaactgctcttgggtggtggaagcaggtgtcacggtgcaagtctccccctgcacccctcccccagcttgagccgtgtcacccccctctccctccagcatgggcctgtgtctcaggctctctggaaggtggccctgccccggaccctcttgcaggtgtcctggtttgacttggaactagatggccatctttccaggctttggtggcccaagagcagtctgggtggatggaagtggctgtcccctcctctccagcccctgcccacccactggtggaggtgctaactagcagggacgtggcataggatgggagctgggcgtgaggtgcttggggtccattctttgtccctcagcttctcagagtccggccagcccttgtgttcccgtgccccacactttcctcctccccactgcagtgagtcaatagtccagggtggggcctggcctccctgccctgattggggactcaggaggtgaggcctggggggcttcctgccccctccttgcccacctgcctgcccccgggcagcacgggagggagagcagggtgagcacgcttgttggtttcagatgcactttctgcttgcattgccgtatctgtgcgttccttcatcctggtcctggctttatggaacaccatgtttttagcatgtttttaaataaaaacggataaagtgtcaaaagcacagca

SEQ ID NO: 1505 - DNA, 1111 bp, Homo sapiens
gtcagcaaaggttcatgctattcgatagatgctttcactaaatgatgagtgggaaatgtaactttgtcatcttgcagagcctacaatgcaaacattttttccgccccatgtacagtttcatttacatagtgttgtcaaggaataagtgatttgtttcacttaagtgatttttccaggtaattgaagcttacctctttgtgcacacattattctttgcttaaactttctttgatgaaaacatggcacatggttctttcctttttttttgcttggtacatataaatgtggctacatcttttcttgacttggggttatcatgataaagattgctttttgttctgtgccgtaatcctgttattgacagctgaattgtgtgggattgagagcctgtatgtgaatagtcacagatccatattcttttagagttaccattattactaataatatagctcctctgagtcattagcaaatcccaggcaggatgctaagaattcatatacattataatcttggctaaaccatccaccccactccaagaaatgatcattattattcctcctactttacaggtaaaaattgaagtttaagggataagtagtaagtggtagagttgagatttgcatccatgtctctctaactgcaagatgcctgttgccagttatacttcttctatttctcctctctgcccctctttgggtatttctgtctgtccggttgctttaaaagcctttgcccaggtaagggcccgagattaggtctgtgcctattttgtggaaattattggtatgtttttcgttaagtggagttctgaaggcatttttgctgatttctgggttcccagacatctgcacggttgccgtttctagaagtctaacctgtgaattcatcactgtgtatgctaaggctttgggagggattataggattttctgcattatgattaagcagcataatcaagaaacttgcagtcagaggaaagcgtggcaattctgtaatgcagaagttggcagaccttttctgtggagggccagatactaaacgtcttagttcattttgtgttgctataaaggtatacctgaggctgggtaatttattaaaaaaaaaaaaagagg

SEQ ID NO: 1506 - DNA, 315 bp, Homo sapiens
gccaaccctacatctttgccctggccatggtcgtgcataccagcttcacttcccgctgccagcacctgcattggtttgtctgaggactttctctgactgtggaagtggtgggctggaaatgcaggggaattagcatccactccctccagtgatgaacagggtttggcctatggatactccagctcccttgctcatccagtgaaactaaggggtgtatattgtacaccttttcccagagtttccaccatggtgagtatcaccatggtgataggtgacttaataggctagtacttttttttttttttggtggcctta

SEQ ID NO: 1507 - DNA, 2582 bp, Homo sapiens
gtctttgccctctcaagttgctcttgaatgttgattcaactcattaggacatacttggatgatgaattagaaggagcatctttgccctctacttacagatcctaggaacaatttgtggaattatcagtaagcaatatctgtaacagataaaatgtctgctttccctttgcccctcttagcctatgacatgccacatccaatttgtcttcgttccaactgtgagaggtcttaatttcatcattctggccttttgcagttaaatgttctccaaggatatgatctatggggagaggactgatagtggaactaatctttcaaagttctgcttaagcaattgtagataacataggagaagaaactctggaaacaattatgattatcctagttctgcccctgtggaaattcaatccgaaacccttcatgtttttgcttctctcttctctacatggatggaatatgttatacttttttgagctgaaaaatctaaataattagaaaaagacaaagttgtaatgagttttctgtttaaacttataggaccctttctaataaaagtgttattgtaatcattgaatcgttagttaactgctttgtatggttatgtcttgtctctctttaatccagggactgcaagcaactaggcaaaaaactaacaaaaaaaccaatgttttataagagtggttctcaaactttaaagtgctgattaaagcacagattgcccaggcctcaccctcagtagatgggtatggggcccaagaactttcaacaggagatgctgctgctgcagcttgtctaagaactacacttggaaaattactaatttgtgtaataaatacctgaccatttggaatccttagaggatggaaatattttgtaatgctgtgtgcaagatttgatatagaaaaacttgggttcaagtggcaattcagcagattacaagaggtgaaacaactgagtttctgagactcagttttattatctgaaagtcaggaatgaaaataatgcctatgtggcagaactgctataaagatcagacaaggtcgtgtatgggaaaggccttggtaaatggaaaagcacaatctaagtgtaacttattctagatgtgttttcaataggcaagttttatatacctaagactaaaagcttgcattttaatccctgggattgaaatctttcaccatcatcaccatgatggtaataacaacaataacaatactagtgcactatttattgtattttctgcaatgggcacttaatatgttttgattatatatttcaaaaacctcataaaatctattttatcatgtatattatttgcttacctaagagtgtactggacagaatttaaatttttcttgagggcttagggcagtgcagttcttagggtgtgtgatgtctctgtctatatagatgatttgatttaaaaatgtgttatatgtgatacatttataacggaatattttttgctaaaaagaaatgagctaccaagctataaaaagatatagaggaaccttggatgcatttttctaagttaaagaagccaatctgaaaaggctataaaactgtatgatttccaccatatgacactctggaaaaggcaaaactatggagatattaaaaagatcagtggttgtcaggggttaaaggggaggaagggataaataggcagagcacagatgtttagggcagtgaattattctgtatgattcatattggtggatccatggtcattatacatttgtcaaaactcatagagtgtgcaacatcaagagtgaactctaatgtaaactatggactatgggtgataatgatgtgtcaacataggtacattaattataacaaatataccactctggtgcccagtgttaatactgggggaactgatgtgtgtagaggacaatggtatatgggaactttctgtaattttgggaactgaaaactgctcttaaaagaataaagtgtattaaaaaggatcacaccaaaaaatgaattgcaaaattcatgacctcatgtgaaagatagtgactgtggtagatagaataatggcccctaaagatgaccacatcctagtccttggaacctgtgaatctgctactttacttggtaaaaggggctctacagatatgattaagttaaggattttgagatgggaaggtcatcctggattatctgagtgggtgcagtgtaatcacaagggtcctttaaagatggaggcagactgtcagaggaattggcacaaaagcagaggtcacacacacacacggggggatagagagagagagagagagagaggaagatgttacactgctggctttaaagatggaggaagtggctattaagtcaagcaaggcatgcaacctcaaaagctccaaaaaacaaggaaatgaccttcagaaggaattcaaccttatattccttgctgacccattttagacttttgactatctgaactttaagttaataaagtgctgttgttttaagccaataaattggtggttatttgttacatcagcaataggaaactggtataatgatttttcaatgaaaatttagacaagattagaaaaaaaaaagaataaaaa

SEQ ID NO: 1508 - DNA, 3345 bp, Homo sapiens
gtgtaaatagaccaaacctatgactaattggagtacctgaaagagatagggagaatggatcaaagttggaaaacacactgtaggatatccttcaggagaacttccccaacctagcaagacagacaattttcaaatttgggaaatccagagaaccccaataagatactccttgaaaagatctaccccaagacacataatcatcagattctccaaggctgagatggaggaaaaattgttaaggtcagccagagagaaaggccaggtcacctacaaagggaaacacatcagactaacagcggacctctcagcagaaaccctgcaagccagacgagattggggggcaatattcaacagtcttaaagaaaagaaattccaacccagaatttcatatccagccacattaagcttcataaacaaaggagaaataaaatcttttttcagacaagcaaatgctggggtattttgtcaccaccagagacctgtcttgcaagagctcctgaaagaagcattaaacatggataggaaaaaccattaccagccactacaaaaatacattgaagtacacagaccaatgacactatgaagcagctacattaacaagtctgcagaattaaccagccagcattatgatgacaggatcaaattcacacataacaatattaaccttaaatgtaaatgggctaaataccccaattaaaggattcagaatggcaagctggatacaaagacaagacccatcactgtgctgtattcaagagacacatctcatgtgcaaagatgcacatagactcaaaataaaggaatggagaaaaatttaccaagcaaatggaaagcataaaaaagcaggggttgcaatcctagtttctaacaaaattttttttgactttaaaccaaaatttttttgactttaaaccaacaaaggtcaaaaaagacaaagaagggcgttacataatgttaaagggttcaattcaacaagaagaggtaactatcctaaatatatatgcacccaatacagaagcacccagatttataaaacaagttcttagagacctacgaagagacttagacccccacataataatagtgggagactttaataccccactgtcaatattagatgggtcaatgaggcagaaaattaatagtttagactgatcaatgagacagaaaattaacaaagatattcagggcttgaactcagctctagaacaagtggacctgataggtatctacagaactctccacctaaaggcaacagaatatacattttttttgacgtcacatggcacttactctaaaattaatcacataattggaagtaaagcactcctcagcaaatgcaaaagaactgaaataataacagtctctcagaccacagcacaatcaaattagaactcaagattaaaaagcccactcaaaaccacacaactacatggaaattgagcaatctgctcctgaatgaatgactcctgggtaaataatgacattaaggcagaaatcaagaagttctttgaaatcaatgagaacaaagaaacaatgtatcagaacctctgggatgcaggtaaagcagtgttaagaaggaaatttatagcactaaatacccacataaaaaatctagaaagatctcgaattgacaccctaacatcacaactaaaagaactagagaatgaagagcaaacaaatcccagagctagcagaagacaagaagtaactaagctcagagtggaactgaaggagataagagtcatgaaaaacccttccaaaaaaatcaatgcatcccgtagctgtttttttttttaaatcaatgaaatagaccaccagcgagactaataaagaagaaaagagagaagatttcaaataaacaccatcagaaacgataaaggggataccactactgacgccacagaaatacaaccaaccatcagataataccataagcacctctatgcaaataaactggaaaatctagaagaatggataaattcctgcactcataaacaccctacaaagactgaaccaggaagaagttgaatccctgaatagaccaataacaagtcctgaaattgaggcagtaataaatggcctaccaatcaaaaaaagcccagctcccgatggatttacagctgaattccaccagaggcacaaagaggacctggtaccattctgaaacaattccaaacaattaaaaaggagagatatctccctaacccattttatgaggccagcatcttcctgataccaaaacctgatggagatacaacaaaaaaagaaaactgcaggccaatatccctgatgaacatcagtgcaaaaatcctcagtaaaatactggcaaattgaatccagcagcacatcaaaaaacatccaccatgatcaagttggcttcatccccgggatgcaaggctggttcaacatacacaaatcaatacatgtcattcatcacataaacagaactaaagataaaaaccacatgattatctcaataggtgcacaaaaggtcttcaataaaattcaacatcccttcatgttaaaaactctcaataaactacgtattgaaagaacatacctcaaaataataagagccatttatgataaacccacagccagcatcatactgaatgggcaaaagctggaagcattccccttgaaaactggcacaaggcaaggataccctctctcactagtcttattcaatgtagtattggaagttctggccagggcaattaggcaagagaaagaaataaagcgtattcaaataggaagagaggaagtcaaattttctttgtttgcagatgacatgatcctatatctcgaaaaccccatcatttcagcccaaaagcttcttaagctgataagcaacgtcagcaaagtctcaagatacaaagtcaatgtgcagaagtcacaagcattcctatacaccaacaacagacaagaagaaatgcaaatcatgaatgaactcccattcacaattgccacaaagagaataaaatacttaggaatacagctaacaaaggaagtgaaagacctcttcaaggagaactacaaaccactgcttatagaaatcaaagaggacacaagcagatggaaaaacatccaatgctcatggataggaagaatcaatatcatgaaaatggccatactgcccaaaggaatttatagattcaatgctattcccattaaactaccatcgacattcttcacagaattagaaaagactaatttaaaattcatatggaaccaaaaaacagttcacattgccaagacaatcctaagcaaaaagaagaaagctggaggtatcacactatccaacttcaaactatactacaagtccacagtaaaaaaaaaaaa

SEQ ID NO: 1509 - DNA, 262 bp, Homo sapiens
gaattatcttctggtaacttcattgaaaaggcctctttaggcatgaaatcacctgccagctgtgctgaggacaggcttcacagagctcctggaggctaattaaggtgcagagttcagagcagaaagatgcttcactatacctgtggcaggatggccaccagggcctgttccctggccagagtaagcactctttccctagggatttggaacagccccattctcacctggtgtttaccccaggttttgaagagattccaaacta

SEQ ID NO: 1510 - DNA, 4150 bp, Homo sapiens
tggtaattgtgacactgtggagctgtccttctttgatgtctcagtcactcagtaagccatgtaatttaaattgaccctctgagtgaccaagttgctctgaaaattttccaagtacatgttacaatgagaatgagagaaggaggagggaaaggcggggacatcatgaaggtagaagaggaggaggtttagaatcaagcacaaagagggctcaaaattacgtggaaattggggctggtcagtcagttagccaggggactaatgactttatgcctgctactctgcagtctaccatcattagggacatcttaaacatagaaaggaaggaacacccaatttcacttcaggcacccagccacaggaactttcctaaggttgagcctttgcgttgaaagtgagaccgttatctaaggattcctctccacaccctgattcctgaggagtgttcaaagactcagaaacaatgacaggcctgctgctgagctttgctgtctgcagtaaatgaacgttcagcccttgccctcctgacctgcttgtctttgtttctacagaacagtgctcggcatggcagggattccagggctcctcttccttctcttctttctgctctgtgctgttgggcaagtgagcccttacagtgccccctggaaacccacttggcctgcataccgcctccctgtcgtcttgccccagtctaccctcaatttagccaagccagactttggagccgaagccaaattagaagtatcttcttcatgtggaccccagtgtcataagggaactccactgcccacttacgaagaggccaagcaatatctgtcttatgaaacgctctatgccaatggcagccgcacagagacgcaggtgggcatctacatcctcagcagtagtggagatggggcccaacaccgagactcagggtcttcaggaaagtctcgaaggaagcggcagatttatggctatgacagcaggttcagcatttttgggaaggacttcctgctcaactaccctttctcaacatcagtgaagttatccacgggctgcaccggcaccctggtggcagagaagcatgtcctcacagctgcccactgcatacacgatggaaaaacctatgtgaaaggaacccagaagcttcgagtgggcttcctaaagcccaagtttaaagatggtggtcgaggggccaacgactccacttcagccatgcccgagcagatgaaatttcagtggatccgggtgaaacgcacccatgtgcccaagggttggatcaagggcaatgccaatgacatcggcatggattatgattatgccctcctggaactcaaaaagccccacaagagaaaatttatgaagattggggtgagccctcctgctaagcagctgccagggggcagaattcacttctctggttatgacaatgaccgaccaggcaatttggtgtatcgcttctgtgacgtcaaagacgagacctatgacttgctctaccagcaatgcgatgcccagccaggggccagcgggtctggggtctatgtgaggatgtggaagagacagcagcagaagtgggagcgaaaaattattggcattttttcaggcaccagtgggtggacatgaatggttccccacaggatttcaacgtggctgtcagaatcactcctctcaaatatgcccagatttgctattggattaaaggaaactacctggattgtagggaggggtgacacagtgttccctcctggcagcaattaagggtcttcatgttcttattttaggagaggccaaattgttttttgtcattggcgtgcacacgtgtgtgtgtgtgtgtgtgtgtgtgtaaggtgtcttataatcttatacctatttcttacaagtgcaagatgactggctttactatttgaaaagtggtgtgtgtatcatatcatatatcatttaagcagtttgaaggcatacttttgcatagaaataaaaaaaatactgatttggggcaatgaggaatatttgacaattaagttaatcttcacgtttttgcaaactttgatttttatttcatctgaacttgtttcaaagatttatattaaatatttggcatacaagagatatgaattcttatatgtgtgcatgtgtgttttcttctgagattcatcttggtggtgggtttttttgtttttttaattcagtgcctgatctttaatgcttccataaggcagtgttcccatttaggaactttgacagcatttgttaggcagaatattttggatttggaggcatttgcatggtagtctttgaacagtaaaatgatgtgttgactatactgatacacatattaaactataccttatagtaaaccagtatcccaagctgcttttagttccaaaaatagtttcttttccaaaggttgttgctctactttgtaggaagtctttgcatatggccctcccaactttaaagtcataccagagtggccaagagtgtttatcccaacccttccatttaacaggatttcactcacatttctggaactagctatttttcagaagacaataatcagggcttaattagaacaggctgtatttcctcccagcaaacagttgtggccacactaaaaacaatcatagcattttacccctggattatagcacatctcatgttttatcatttggatggagtaatttaaaatgaattaaattccagagaacaatggaagcattgcctggcagatgtcacaacagaataaccacttgtttggagcctggcacagtcctccagcctgatcaaaaattattctgcatagttttcagtgtgctttctgggagctatgtacttcttcaatttggaaacttttctctctcatttatagtgaaaatacttggaagttactttaagaaaaccagtgtggcctttttccctctagctttaaaagggccgcttttgctggaatgctctaggttatagataaacaattaggtataatagcaaaaatgaaaattggaagaatgcaaaatggatcagaatcatgccttccaataaaggcctttacacatgttttatcaatatgattatcaaatcacagcatatacagaaaagacttggacttattgtatgtttttattttatggctctcggcctaagcacttctttctaaatgtatcggagaaaaaatcaaatggactacaagcacgtgtttgctgtgcttgcaccccaggtaaacctgcattgtagcaatttgtaaggatattcagatggagcactgtcacttagacattctctgggggattttctgcttgtctttcttgagctttttggaaggataattctgataaggcactcaagaaacgtacaaccacagtgctttcttcaaatcatatgagaaatactatgcatagcaaggagatgcagagccgccaggaaaattctgagttccagcacaattttctttggaatctaacaggaatctagcctgaggaagaagggaggtctccatttctatgtctggtatttgggggttttgtttgtttttgctttagcttggtgaaaaaaagttcactgaacaccaagaccagaatggatttttttaaaaaaatagatgttccttttgtgaagcaccttgattccttgattttgattttttgcaaagttagacaatggcacaaagtcaaaatgaaatcaatgtttagttcacaagtagatgtaatttactaaagaatgatacacccatatgctatatacagcttaactcacagaactgtaaaagaaaattataaaataattcaacatgtccatctttttagtgataataaaagaaagcatggtattaaactatcatagaagtagacagaaaaagaaaaaaggactcatggcattattaatataattagtgctttacatgtgttagttatacatattagaagcatatttgcctagtaaggctagtagaaccacatttcccaaagtgtgctccttaaacactcatgccttatgattttctaccaaaagtaaaaagggttgtattaagtcagaggaagatgcctctccattttccctctctttatcagaggttcacatgcctgtctgcacattaaaagctctgggaagacctgttgtaaagggacaagttgaggttgtaaaatctgcatttaaataaacatctttgatcacaaaa

SEQ ID NO: 1511 - DNA, 4710 bp, Homo sapiens
taaagaaggtctggatgttatggagagagctgatcctttattccttttaattggacttcctactattcctgtcatgctgatattaggcaagatgattcgctgggaggactatgtgcttagactgtggcgcaaatactcgaataaactacaaattttaaatagtatatttccaggtaaggcactgaactgtggttgtaaagtgcataccaaattgatcttgaagaacaataacatgcttttttagccatgtttgaaggtagtctaactcttctgatttattagcactaacgcactgcatttttttcctctagggataggttgtcctgttcctcgaattccagctgaggccaatcctttagcagatcatgtctctgctactcgaatcttgtgtggagcccttgtctttcctactattgctacaatagttggtaaattgatgttcagtagtgttaactctaatttacaaaggacaatcttggtaagacggctttaacattacttatattaccttgcaaaagagaatgaagtgtatttgtttttaaaaggtggggaactgtataaatattcggtctgtggctcctatgcattaagcctctatttgagcctcactatcattcaatagcttgagtggaaataaaaagaggagaaaccactgcagcagttctggccttttggaactatgttgtaggtgctttctctcctggcatatgcatgaatcatcacacctgtccctcttgccagtgggattacagtactttacgatcagaccacctggttcaaatcccatcacagaaattgtcttgctgtgaaatctaaatcaaatgtctggactttttgttcctgtagtatggtgatggtaataatcaggattattgtgaggattgtataagtactagcacatagtaagcactcatgttgtttgctattattgttactcccacttctcccctctggtggcatgtaacctgcacggaccttggaggactgaacaaagggggcaaacgtgggaataaaagacaaagacaagagagtatatttggaagaaggggtcagggggcaccttgcctctagtggacaagggccctgagctttacacagccctctgtatttattaggcaaaagagatagtgagaagcaggggtgattgtcgggtaattgtcagtccatttggcagtttggttcacagcaggcttgcgagactgcatcatttgaacagtaggcgctagatttcccagtagataagttcaaggagccctgcaccagggagtgatggcccccagcaaaccctttggtggcaggctcagtgtgagtttactcacatcctgcattcatgataaacagtttgctgtttggtcatatagcctccagtggaatgctgagttggtcacgatccctttggcctttcttgctcccaacagtggcagtctgcacatagtgccctagcattcttctttgtatatcagagtatatgtagaactacatggaagaaagactagtcagaaaggataatggagaaggcatctgtgtcccctgttacctgtagtaacagcgtatagtctgtctctctccctatctcatctcctagtagaaaaagaaaactgtttcatttgcagtcatctgaattagtttagcatcaaagcctacgtcttttgtgatctaaataaaattatttttattactctgtttctctaaatctgcattataaaaagctaattttcctttttattttagggtggaattgcgtttgttgccataaaaggagcatttaaagtttacttcaaacagcagcaatatttacgacaggcacaccgcaaaattctgaattatccagaacaagaagaagcataaaactgacttctggttgttctgcagttctctcatccttatgaatctgttgtgttgttttgattccatcattaatgcacttgtggagacttgtgataagctgctgctcctatattttttaagaaatataataaagcacttagggcaggggaaatcatctcggtaatcatggaacctaaggatgtgatttgttttcattgtttgtatgtactacttttatggcagtcatatgaaccattatcttagcatggtaaacctgggttttgttcatattttctccagacagaaatgcaaagatcaaactgtgcaaatattaaaaaaatgcacatgctgttttattcaaatgcctcttttgtacatgttcatgtttagtgttttctcagaatcagcaactcaaggtactatgaggatttttctcactgacataatttgattacatactaaataagaggatatgttaatatgaggaaatgtaaattaaattagttataaataaataaccaaaaatgtatgtaaacattcaaatgattatctgaacaaatgagattttgtggtgttttctttaacccatgtgatgtcctccaaaatgtgtagggtaaaaattcacagggcttccagatcactttttcaatattaaattttatttacataatgttgacatctcatacttcatgaagtaattttgactcatgcagtcgtgtgtgtgtgtgtgtgtgtgtgtgtgtgtgtgtgtgtatttgtgtgtttcagtgtttcatcaggtccttccatctctgggagttttttcaacccatatttctagaaattacagctgccagtttatagtagtttgagcagaggatgatttgcaaaaataaaaataaagttattttactctcctcttgcattgattcagttattgagatattcgttgatcacctcctatttcccaggcactgtgcagagtgctgtaggacatagtggtgaacaagacagacttggtccaagctcttacagagttgacagtctagtttcagcacatagaaaaccagcagtgaataaaccaaggtgaggccttgagctctttgtttttatattaatgaggagaaaagtatgaaaacaagaagtcttaagtaaatattgaggtcattgtttttggcttaagtttattatagaaaatcaacactaatgtttttagattttaattgtcctattgatgaggctagcaccttaatcactgtttagttttgtattcatttttaaaagcaattattgaagccattttcaatagattggccattttaatgttcagcaacctgaatggttatttttgttaattaaaattaaatttttaagagatattttcaaaaccctatttattttcttgttcacagtaatgcatgtcaataataaatgtttccccttactgataagcggccactttaggagtgtagcaaatatagattgagctatgttagtttgcaataatatatgttaactttagtaattaaagactggtttctatagtatgaatgtcttaattttgagttatatgatgtttatttgaatgactgttgaacattcaaatttgtattatttggagatgaagatttgactaacagtgagccttattaagaacactactacagttctgaaggggaaatataacatctatggttatatattttaaaaacttagattataggctgtaattataaaatatattggcttttgttttcaatgtgaaagatacattaaatggacacatatcttgcaaaattttgttgtatagaacagtttttaggcagcctttactaaagttatgcaaacacacagttccccatttactacattaatgcccttgacagggagtagctgcttggttttataggtattagggctcatgaaggccggggaacaactctaatccttttggggcaggagggagggtttttttagggttgcggggagggaactgcaagtgcctgaggaccagagtggcctctagccccgaattgaacacttttaaacctaaagagccttattattattagctcgagaaataccacatgccagtcttcccaggaaggtgacctgcctgaccatgaagcaacaaaagagcataggcagacttaaagttggatagacctgggttcaaatcatagttcagctttcaataactgtatgtatgattttggctaaaggatttgactttctctcaactgcagttttcttaatctttgaaatgcaaataatgtttatctcagaagactatttctaggattaactgagagattaaaggaacagcagcacttaggctcaaaatcgcccctacaaagcagtagttgtttcttaattgctaagtaatctgtttgcactctaggaaaagtaaatggagaggtaaaagaaaggcattggggacaaatgaaagagatgatgtagatttttcggatgggtgggtatattttattttccagtttattttcatatttctttactgtgttatttctggaaactttaatgttttaaacctcttttataaaattcaatgacgactactagaattcttttcaaaagttaacttatctccaaagtggctgaaaatattgtttaccattacatgattatgaaatgactgtgaagaatataaaattaaacttagtgacttaattagtcactgccttgctaactttgctgtaatttttttaaacgtcttgtttttaatatagcaaactatctcaatactggctggattaggttaaataaagaatttttatgttctctaggtgtactttgttaaatctcaaaacattctgtacatacataattttttttaatcacagttatcgagatactagtttttgtaagtaaaagtaatctgaattt

SEQ ID NO: 1512 - DNA, 5204 bp, Homo sapiens
  misc_feature (151)..(151): n equals a,t,g, or c
ttttttatggctgcatagtattccatggtgtatatgtgccacattttctttatccagtctatcatttatgagcatttgggttgtttccaagtctttgctattgtaaatagtgctgcaataaacatacatgtgcatgcatctttatagtagnaatgatttataatcttttgggtatatacccagtaatgggattgctgggtcaaatggtatttctggttctagatccttgaggagtcaccacactgtcttccacaatggttgaactaatttagactcccaccaccagtgtaaaagtgttcctatttttccacatcctcaccagcatctgttgtttccagactttttaatgattgtcattctaactgatgtaaaatggtatctgattgtgatctcagtggtatctcattttgatttacatttctctaatgaccagtgatgatgagctttttttcatttgcttgttggccacataaatgtcatcttctgagaagtgtctgttcatatccttcacccactttttgatggggttgtttttttttcttctatatttgtttaagttccttgtagattctggatattagacctttgtcagatggatagattgcgaaaattttctcccattctgtagggtgcctgtttactctgatgacagtttcttttgctgcgcagaagctcttagtttaattagatgccatttgtcaattttggcttttgttgccgttgcttttggtgttttagtcatgaagtctttgctcatgcctgtgtcctgaaatgtattgtctagattttcttctagggtttttatggttttaggttttagatttaagtctttaatccaccttgagttaatttttatataaggtgtaaataaggggcccagtttcagttttctgtgtatggctatccagttttcccaacaccatttattaaatagggattcctttctgcattgctagtttttgtcagatttgttgaagatcagatggttgcagaagtattatttctgaggcttctgttccattggtctacacatctgttttggtaccagtaccatgctgttttgggtacggtagtcttgtagtacagtttgaagtcaggtagcatgatgcctccagctttgttctttttgcttaggattgccttggctatacaggctcttttttggttccatatgaaatttaaagtagtttttccaattctgtgaagaaagtcaatggtagcttgatgggaatagcattcaatctataaattactttgggcagtatggccatttttatgatactgatttttcccatccttgaacttggaatctttttccatttgtttgtgtcctctcttatttccttgagtagtggtttgtagttctccttgaagaactcctacatgtcccttgtaagttgtattcctaggtattgtattttctttgtagcagttgtgaatgggagttcactcttgagttggctctctgtttatctattattggtgtataggaatgcttatgatttttgcacattggttttgtatcctgagactttgctgaagtcgtttatcagcttaaggagttttggggctgagacattggggttttctaaatatacaattatgccatctgcaaacagagacaatttgacttgctgtcttcctatttgaataccctttattttttttctcttacctgattgctctggccagaacttccaatactgtgttgaataggagtggtgagagagaatatctttgtcttctgccagttttcaaaaggaatgcttccagttttgcttattcaatataatgttggctgtgggtttgtcataaatagctcttattattttgagatatgttccatcaatacctagtttattgagtttttagcctaaagggtgttgaattttattgaaggccttttccgcatgtattgagataatcatgtggtttttgtcattggtcctcttatgtgatggattatatttattgatttgcctgtgttgaccagccttgcatcccaaggatgaagctgacttgatcatggtgtataagctttttgatgtgctactggaatcggtttgcctgtattttattgagcatttttgcaccaatgttcatcagcgatattggcctgaaattttctttatttcttttttttttttttgtacctctgccaggttttggtatcaggatgatgctggtgtcataaaatgagttaaggaggagtccctctttttccattgtttggaatagtttcaaaaggaatggaaccagctcctctttgtacctctggtagaatttggctgtgaatccgtctggtcctgggctttttttggttggtaggctattaagtattgcctcaatttcagaacttgttattggtctattcagggattcgaattcttcctggtgctgtcttgggagggtgtacatgtccaggaacttatccatttcttctagattttctagtttatttgtgtaggggtgtttatagtattctctgatggtagtttttatttctgtgggatcagtggtgatatctcctttatcattttttattgtgtctatttcattcttctctcatttcttctttattagtctggctagtggtctatctattttgttaatatttttgaaaaaccagctgctggatgtgttgatttttggaagggttttccatgtctctatttctttcagttcatctctgatcttagttatttcttgtattcttgtaccttttgaatttgtttgctcttgcttctctagttctttcaattgtgatgtaagggtgttgattttagatctttcccactttctcctgtgggcatttagtgctataaatttctctattaacactgctttagctgtgtcccagagattctggaacattgtctttttgtcctcgttggtttcaaagaacttctttatttctgccttaatttcgttatttactaagtagtcattcaggggcaggttgttcagtttccatgtagttgtgcggttttgagtgaatttcttaatcttgagttctaatttgattgcactgtggtctgagagagtgtttgttataatttctgttcttttgcatttgctgaggagtgttttacttccaattatgtggtctattttagaataagtgctatgtatattctgagaagaatatatattctgttgatgtggggtggagagttctgtaggtgtctattaggtccacttggtccagtgctgagcacaagtcctgaatgtccttgttaattttctgtctccattgacccatctaatgttgacagtggagtgcaaaagtctccaactattattgtgtgggagtctaaatctctttgtaggtgtctaagaacttgttttataaatgtgggtgctcctgtattagattcatatatatttacgatacttagctcttcatgttgcactgatccctttaccactacgtaatgccctactttgtcttttttttatctttgtttgtttaaagtctgttttatcagaggataggattgcaacccctgctttttttcactttccatttgcttgttaaatcttcctccacctctttattttgagcctatatgtttctttccatgtgagatgggtcttctgaatacagcacactgatgggtcttgactctttatccaatttgtcagtctgtgtcttttaactggggcatttaacccatttacatttaaagttaatattgttatctgtgaatttgatcctgtcatcatggtgctagctggttattttgcacattagttgatacagtttcttggtagtgtctttggtctttatattttggtgtgtctttgcagtggcttgtactggttcttcctttccacatttagtgcttccttcaggagctcttgtaaggcaggcctggtggtgacaaaatcccccagcatttgcttgtgtgtaaaggattttacttcttcttcacttatgaagcttagtttagctggatatgaaattctgggttgaaaactcttttctttaagaatgttgaatattggcccccatcctcttctggcttgtagggttcctgcagagagatctgctgttagtctgttgggcttccctttgtgggtaacctgacctttttctctggctgcccttaatattttttccttcatttcaatgttggagaatttgacagttatgtgtcttggggttgctcttctcaaggagtatgttagtagttctctgtatttcctgagtttgaatattggcctgtcttgctaggttggggaagttctcctggataatatcctaaaatgtgttttccaacttgattccattctccccatcactttcagggaccccagtcagtcataggtttggtctttttctatagtcccatatttcttggaggctttgttccttttcattcttttttctctaaccttgtcttcacaccttatttcagtaagttgaccttcagtctctgatatcctttcttccacttgattgatttggctattgatacttgcttatatttcatgaagttctcgtgctgtgtttttcagctctattaggtcatttatgttcttctctaaactggttattctagttattagttcatgtggccttttttttttttaaaggtttttagcttccttgcattgggttagaacaagcttttttagctcaagagtttgttattaccccccttctgaagcttacttccatcaattcctcaaactcattctgtgtccatttttgtgcccttactagagaggatctgggataatttggaggagaagaggcattctggttttttaaattttcagcatttttgcacggttttttcctcatcttagtggatttatctacctttgtactttgaggctgatgacctgtggatgagattctgtgtgggggtcctttttgtcgatgttgatgttattgctttctgtttgttaggtattctaacaggcaggcccctctgctgcaggtctgctgcagtttgctggaggtccactgcagaccctatttgcctgggtatcaccagcagaggctgcagaacagcaaagattgctgcctgctccttcctctggaagtttcgtcccagaggggcatggacctgatgccagctggagctctcctgtataggtgtctgtcaactcctgttgggaggtctctcccaatcaggaggcatggaggtcagggacccacttgaggagcagtctgtctcttagcagagctcgag

SEQ ID NO: 1513 - DNA, 3049 bp, Homo sapiens
gtaaataccctatgaatattgaatgaatgagtttgtggattttaaatatttaaccaaagatgtaatattttttgttgtgtatggtttttcatgagcctgtttgtaaaattaattctttgttttccagttgatgaaacttctgagcaggaacaaaaacataaagaaaccaacaatagcaatgctcagaaccccagcgaagaagagggtgaagggcaagatgaggacattttacctctaacccttgaagagaaggaaaacaaagaatacctaaaatctctatttgaaatcttgattctgatgggaaagcaaaacatacctctggatggacatgaggctgatgaaatcccagaaggtctctttactccagataactttcaggcactgctggagtgtcggataaattctggtgaagaggttctgagaaagcggtttgagacaacagcagttaacacgttgttttgttcaaaaacacagcagaggcagatgctagagatctgtgagagctgtattcgagaagaaactctcagggaagtgagagactcacacttcttttccattatcactgacgatgtagtggacatagcaggggaagagcacctacctgtgttggtgaggtttgttgatgaatctcataacctaagagaggaatttataggcttcctgccttatgaagccgatgcagaaattttggctgtgaaatttcacactatgataactgagaagtggggattaaatatggagtattgtcgtggccaggcttacattgtctctagtggattttcttccaaaatgaaagttgttgcttctagacttttagagaaatatccccaagctatctacacactctgctcttcctgtgccttaaatatgtggttggcaaaatcagtacctgttatgggagtatctgttgcattaggaacaattgaggaagtttgttcttttttccatcgatcaccacaactgcttttagaacttgacaacgtaatttctgttctttttcagaacagtaaagaaaggggtaaagaactgaaggaaatctgccattctcagtggacaggcaggcatgatgcttttgaaattttagtggaactcctgcaagcacttgttttatgtttagatggtataaatagtgacacaaatattagatggaataactatatagctggccgagcatttgtactctgcagtgcagtgtcagattttgatttcattgttactattgttgttcttaaaaatgtcctatcttttacaagagcctttgggaaaaacctccaggggcaaacctctgatgtcttctttgcggccggtagcttgactgcagtactgcattcactcaacgaagtgatggaaaatattgaagtttatcatgaattttggtttgaggaagccacaaatttggcaaccaaacttgatattcaaatgaaactccctgggaaattccgcagagctcaccagggtaacttggaatctcagctaacctctgagagttactataaagaaaccctaagtgtcccaacagtggagcacattattcaggaacttaaagatatattctcagaacagcacctcaaagctcttaaatgcttatctctggtaccctcagtcatgggacaactcaaattcaatacgtcggaggaacaccatgctgacatgtatagaagtgacttacccaatcctgacacgctgtcagctgagcttcattgttggagaatcaaatggaaacacagggggaaagatatagagcttccgtccaccatctatgaagccctccacctgcctgacatcaagttttttcctaatgtgtatgcattgctgaaggtcctgtgtattcttcctgtgatgaaggttgagaatgagcggtatgaaaatggacgaaagcgtcttaaagcatatttgaggaacactttgacagaccaaaggtcaagtaacttggctttgcttaacataaattttgatataaaacacgacctggatttaatggtggacacatatattaaactctatacaagtaagtcagagcttcctacagataattccgaaactgtggaaaatacctaagagacttttaaaaataggctttcttatatttgatatttggaagaaaaagccgtaaggtgtatgtagaccacttaatcactaaatatctttgcctataggactccattgaatacattagccattgataatctacctgtttaaatggcccctgtttgaactctcaagctttgaagacctacctgttcttccagaagagaacgttgaaagtgccatgtttccttttgcgtgatctctgttgatggcactctggaattgtttcagttaagtcattttagacatagcatttattatcactgtggatctctacttgttgggtgttatgaattctttgaagaaatatattttgaagaggtgtgggaggaaggaatacattttataaaatgttgtagtgaagcccacaattgacctttgactaataggagttttaagtatgttaaaaatctatactggacagttacaagaaattaccggagaaaagcttgtgagctcaccaaacaaggatttcagtgtagattttgtctttcttgaacttaaagaaacaaatgacaaagtttgaatggaaaagcctgctgttgttccacatctcgttgctgtttacattcctttgtggagcctacatcttcctaagctttttagcaggtatatgttgaacacttctgtttcatggttgagacagaatcagaggccatggatactgacaactgatttgtctgttttttttctctgtctttttccatgactcttatatactgcctcatcttgatttataagcaaaacctggaaaacctacaaaataagtgttgtggtttatctagaaaaatatggaaaatattgctgttatttttggtgaagaaaatccattttgtatagtttatttcaatctaaataaaatgtgaattttgtttaaagcttaggcacattattttttgtggggtccaaacattcttgtgtaaaattctcttaaacatttgataaacagcttcacaattca

SEQ ID NO: 1514 - DNA, 1153 bp, Homo sapiens
ctgtgatgaaggttgagaatgagcggtatgaaaatggacgaaagcgtcttaaagcatatttgaggaacactttgacagaccaaaggtcaagtaacttggctttgcttaacataaattttgatataaaacacgacctggatttaatggtggacacatatattaaactctatacaagtaagtcagagcttcctacagataattccgaaactgtggaaaatgcctaagagacttttaaaaacaggctttcttatatttgatatttggaagtaaaagccgtaaggtgtatgtaggccacttaatcactaaatatctttgcctataggactccattgaatacattagccattgataatctacctgtttaaatggcccctgtttgaactctcaagctttgaagacctacctgttcttccagaagagaacgttgaaagttccatgtttccttttgcgtgatctctgttgacggcactctggaattgtttcagttaagtcattttagacatagcatttattatcactgtggatctctacttgttgggtgttatgaattctttgaaaaaatatattttgaagaggtgtgggaggaaggaatacattttataaaatgttatagttaagcccacaattgacctttgactaataggagttttaagtatgttaaaaatctatactggacagttgcaagaaattaccagagaaaagcttgtgagctcaccaaacaaggatttcagtgtagattttgtctttctcaaacttaaagaaacaaatgacaaagtttgaatggaaaagcctgctgttgttccacatctcattgctgtttacattcctttgtggagcctacatcttcctaagctttttagcaggtatatgttgaacacttctgtttcatggttgagacagaatcagaggccatggatactgacaactgatttgtctggtttttttttctgtcttttttccatgactcttatctactgcctcatcttgatttataagcaaaacctggaaaacctacaaaataagtgttgtggtttatctagaaaaatatggaaaatattgctgttatttttggtgaagaaaatcaattttgtatagtttatttcaatctaaataaaaagtgagttttgtttaaagctaaaaaaaaaaaaaaaga

SEQ ID NO: 1515 - DNA, 3048 bp, Homo sapiens
gtaaataccctatgaatattgaatgaatgagtttgtggattttaaatatttaaccaaagatgtaatattttttgttgtgtatggtttttcatgagcctgtttgtaaaattaattctttgttttccagttgatgaaacttctgagcaggaacaaaaacataaagaaaccaacaatagcaatgctcagaaccccagcgaagaagagggtgaagggcaagatgaggacattttacctctaacccttgaagagaaggaaaacaaagaatacctaaaatctctatttgaaatcttgattctgatgggaaagcaaaacatacctctggatggacatgaggctgatgaaatcccagaaggtctctttactccagataactttcaggcactgctggagtgtcggataaattctggtgaagaggttctgagaaagcggtttgagacaacagcagttaacacgttgttttgttcaaaaacacagcagaggcagatgctagagatctgtgagagctgtattcgagaagaaactctcagggaagtgagagactcacacttcttttccattatcactgacgatgtagtggacatagcaggggaagagcacctacctgtgttggtgaggtttgttgatgaatctcataacctaagagaggaatttataggcttcctgccttatgaagccgatgcagaaattttggctgtgaaatttcacactatgataactgagaagtggggattaaatatggagtattgtcgtggccaggcttacattgtctctagtggattttcttccaaaatgaaagttgttgcttctagacttttagagaaatatccccaagctatctacacactctgctcttcctgtgccttaaatatgtggttggcaaaatcagtacctgttatgggagtatctgttgcattaggaacaattgaggaagtttgttcttttttccatcgatcaccacaactgcttttagaacttgacaacgtaatttctgttctttttcagaacagtaaagaaaggggtaaagaactgaaggaaatctgccattctcagtggacaggcaggcatgatgcttttgaaattttagtggaactcctgcaagcacttgttttatgtttagatggtataaatagtgacacaaatattagatggaataactatatagctggccgagcatttgtactctgcagtgcagtgtcagattttgatttcattgttactattgttgttcttaaaaatgtcctatcttttacaagagcctttgggaaaaacctccaggggcaaacctctgatgtcttctttgcggccggtagcttgactgcagtactgcattcactcaacgaagtgatggaaaatattgaagtttatcatgaattttggtttgaggaagccacaaatttggcaaccaaacttgatattcaaatgaaactccctgggaaattccgcagagctcaccagggtaacttggaatctcagctaacctctgagagttactataaagaaaccctaagtgtcccaacagtggagcacattattcaggaacttaaagatatattctcagaacagcacctcaaagctcttaaatgcttatctctggtaccctcagtcatgggacaactcaaattcaatacgtcggaggaacaccatgctgacatgtatagaagtgacttacccaatcctgacacgctgtcagctgagcttcattgttggagaatcaaatggaaacacagggggaaagatatagagcttccgtccaccatctatgaagccctccacctgcctgacatcaagttttttcctaatgtgtatgcattgctgaaggtcctgtgtattcttcctgtgatgaaggttgagaatgagcggtatgaaaatggacgaaagcgtcttaaagcatatttgaggaacactttgacagaccaaaggtcaagtaacttggctttgcttaacataaattttgatataaaacacgacctggatttaatggtggacacatatattaaactctatacaagtaagtcagagcttcctacagataattccgaaactgtggaaaatacctaagagacttttaaaaataggctttcttatatttgatatttggaagaaaaagccgtaaggtgtatgtagaccacttaatcactaaatatctttgcctataggactccattgaatacattagccattgataatctacctgtttaaatggcccctgtttgaactctcaagctttgaagacctacctgttcttccagaagagaacgttgaaagtgccatgtttccttttgcgtgatctctgttgatggcactctggaattgtttcagttaagtcattttagacatagcatttattatcactgtggatctctacttgttgggtgttatgaattctttgaagaaatatattttgaagaggtgtgggaggaaggaatacattttataaaatgttgtagtgaagcccacaattgacctttgactaataggagttttaagtatgttaaaaatctatactggacagttacaagaaattaccggagaaaagcttgtgagctcaccaaacaaggatttcagtgtagattttgtctttcttgaacttaaagaaacaaatgacaaagtttgaatggaaaagcctgctgttgttccacatctcgttgctgtttacattcctttgtggagcctacatcttcctaagctttttagcaggtatatgttgaacacttctgtttcatggttgagacagaatcagaggccatggatactgacaactgatttgtctgttttttttctctgtctttttccatgactcttatatactgcctcatcttgatttataagcaaaacctggaaaacctacaaaataagtgttgtggtttatctagaaaaatatggaaaatattgctgttatttttggtgaagaaaatcaattttgtatagtttatttcaatctaaataaaatgtgaattttgtttaaagcttaggcacattattttttgtggggtcaaaacattcttgtgtaaattctcttaaacatttgataaacagcttcacaattca

SEQ ID NO: 1516 - DNA, 3043 bp, Homo sapiens
gtaaataccctatgaatattgaatgaatgagtttgtggattttaaatatttaaccaaagatgtaatattttttgttgtgtatggtttttcatgagcctgtttgtaaaattaattctttgttttccagttgatgaaacttctgagcaggaacaaaaacataaagaaaccaacaatagcaatgctcagaaccccagcgaagaagagggtgaagggcaagatgaggacattttacctctaacccttgaagagaaggaaaacaaagaatacctaaaatctctatttgaaatcttgattctgatgggaaagcaaaacatacctctggatggacatgaggctgatgaaatcccagaaggtctctttactccagataactttcaggcactgctggagtgtcggataaattctggtgaagaggttctgagaaagcggtttgagacaacagcagttaacacgttgttttgttcaaaaacacagcagaggcagatgctagagatctgtgagagctgtattcgagaagaaactctcagggaagtgagagactcacacttcttttccattatcactgacgatgtagtggacatagcaggggaagagcacctacctgtgttggtgaggtttgttgatgaatctcataacctaagagaggaatttataggcttcctgccttatgaagccgatgcagaaattttggctgtgaaatttcacactatgataactgagaagtggggattaaatatggagtattgtcgtggccaggcttacattgtctctagtggattttcttccaaaatgaaagttgttgcttctagacttttagagaaatatccccaagctatctacacactctgctcttcctgtgccttaaatatgtggttggcaaaatcagtacctgttatgggagtatctgttgcattaggaacaattgaggaagtttgttcttttttccatcgatcaccacaactgcttttagaacttgacaacgtaatttctgttctttttcagaacagtaaagaaaggggtaaagaactgaaggaaatctgccattctcagtggacaggcaggcatgatgcttttgaaattttagtggaactcctgcaagcacttgttttatgtttagatggtataaatagtgacacaaatattagatggaataactatatagctggccgagcatttgtactctgcagtgcagtgtcagattttgatttcattgttactattgttgttcttaaaaatgtcctatcttttacaagagcctttgggaaaaacctccaggggcaaacctctgatgtcttctttgcggccggtagcttgactgcagtactgcattcactcaacgaagtgatggaaaatattgaagtttatcatgaattttggtttgaggaagccacaaatttggcaaccaaacttgatattcaaatgaaactccctgggaaattccgcagagctcaccagggtaacttggaatctcagctaacctctgagagttactataaagaaaccctaagtgtcccaacagtggagcacattattcaggaacttaaagatatattctcagaacagcacctcaaagctcttaaatgcttatctctggtaccctcagtcatgggacaactcaaattcaatacgtcggaggaacaccatgctgacatgtatagaagtgacttacccaatcctgacacgctgtcagctgagcttcattgttggagaatcaaatggaaacacagggggaaagatatagagcttccgtccaccatctatgaagccctccacctgcctgacatcaagttttttcctaatgtgtatgcattgctgaaggtcctgtgtattcttcctgtgatgaaggttgagaatgagcggtatgaaaatggacgaaagcgtcttaaagcatatttgaggaacactttgacagaccaaaggtcaagtaacttggctttgcttaacataaattttgatataaaacacgacctggatttaatggtggacacatatattaaactctatacaagtaagtcagagcttcctacagataattccgaaactgtggaaaatacctaagagacttttaaaaataggctttcttatatttgatatttggaagaaaaagccgtaaggtgtatgtagaccacttaatcactaaatatctttgcctataggactccattgaatacattagccattgataatctacctgtttaaatggcccctgtttgaactctcaagctttgaagacctacctgttcttccagaagagaacgttgaaagtgccatgtttccttttgcgtgatctctgttgatggcactctggaattgtttcagttaagtcattttagacatagcatttattatcactgtggatctctacttgttgggtgttatgaattctttgaagaaatatattttgaagaggtgtgggaggaaggaatacattttataaaatgttgtagtgaagcccacaattgacctttgactaataggagttttaagtatgttaaaaatctatactggacagttacaagaaattaccggagaaaagcttgtgagctcaccaaacaaggatttcagtgtagattttgtctttcttgaacttaaagaaacaaatgacaaagtttgaatggaaaagcctgctgttgttccacatctcgttgctgtttacattcctttgtggagcctacatcttcctaagctttttagcaggtatatgttgaacacttctgtttcatggttgagacagaatcagaggccatggatactgacaactgatttgtctgttttttttctctgtctttttccatgactcttatatactgcctcatcttgatttataagcaaaacctggaaaacctacaaaataagtgttgtggtttatctagaaaaatatggaaaatattgctgttatttttggtgaagaaaatcaattttgtatagtttatttcaatctaaataaatgtgaattttgtttaaagcttaggcacattattttttgtggggtcaaaaccattcttgtgtaaattctcttaaacatttgataaacagcttcaca

SEQ ID NO: 1517 - DNA, 38771 bp, Homo sapiens; identical to SEQ ID NO: 1183
  misc_feature (7892)..(9416): n equals a,t,g, or c

SEQ ID NO: 1518 - DNA, 779 bp, Homo sapiens
agccttcatccaggtgagaatgtgctgcagctggtttctttgggaggcctgtgggttaaagtaagcgatagtctatatgccgtgtggccatctacgaataagggctgggattgctggtggctctggtgcagcacagtcactgctttttccatacttggagagcctatgggagtgcgattttgatagggcttgaattgcaggaagagcccatggctcccaaggtggggcttgcatttctatcaagtagctgttaataatggggcagttgctgggcaactgtgtgctcagcagctgggcttttccctcagcccctctactaacctgctgtgaggcaagacaagggcaggacactaacgttcctgtctcctgattctttttctttaccattccttaagagaaggaaagcagagacggtccagtcctgtgatttctcagtgcttgttctaatcatatgtgctgattccctgttgaatgaagatgaaggccgggtgcggtggctcaggcctgtaagcccagcactttgggaggccaaggtgggtggatcacctgaggtttggagtttgagaccagcctggccaacatggtgaaaccccatctctactaaaaatacaaaaattagctgggcatggtaagtgggcgcctgtaatcccagctacttgagaggctgaggcaggagaattgcttgaacccaggaggcagaggctgcagtgagccgagatcgcgccatcgcactccagcctgggcgacaacactgtctcaaaaaaaaaaaaaaaaaaaaa

SEQ ID NO: 1519 - DNA, 5775 bp, Homo sapiens; identical to SEQ ID NO: 1187

SEQ ID NO: 1520 - DNA, 738 bp, Homo sapiens; identical to SEQ ID NO: 1188

SEQ ID NO: 1521 - DNA, 587 bp, Homo sapiens
attggatcctacagctaagattatttggaagcatgtcctgtgccctttctctgagagttaccccgttatctttgtgtgtctcactgtctctcatcaggcttaaaaaaaataccaaagcttttctcaccccaaaagactgtctcctgacctgccacctcacacagttgtctcttcccttcattgccaaactttcaggatgagcatactctagccttctcgaagtgtggcttctgtcccccttcccccaggtgccaaagccaggagtcagccttccctaggttcacctacttccctgcagcatctaacagactatccctccttcctgccgaaactactcctccaccgctaagaatttaggcagtagggccaggcatggtggctcacgcctgtaatcccagcactttgggaggccaaggtgggtggatgacctgaagtcaggagttcgagaccagcctgaccaacatggcaaaaccctgtctctactaaaaatacaaaaattagccaggtgtggtggcaggcgccaataatctcagctactccagaggctgaggcatgagaatcacttgaacctaggaggttgaagtaag

SEQ ID NO: 1522 - DNA, 753 bp, Homo sapiens
gtcccagctactcaggaggctgaagcgggagagtcacgtgaacccgggaagcagagtgagctgagcacacactactatactccaggctgggtaacaaagcgagactcccatctcccaaaaagcagttctggaatagaactcacgctagatggatagaccagtggacactttggaaccttggggctggggaggaaactgcccatccagtaaacccccaaaaagccatttgttctgcactacgtatattgcttattctttctggtcttaagtacttgcctctcaacctccctttttagtaaaagacaaggccacgtgagaggcgggactatcaacattgtgatgaatttacttgaaacccagtgcccaaaatcaatgtaggtagccaagtccaaaaacctgttctagtccaactagtgaaatcaaactgtgatacttggataagcttagaaggaaacgtgaagaatacgtagctgctttgggtttactctggttcagttgggctgttgaaatcttaacatccttgggcttatcacctactgcttgtcagccctgttccatgtccaggggatgggggtggtgacaatccagttccaagaccctcatgctctagagaggaaggtggccagccagggttgtaactacgatgaaaaagcagtgggagggtctcctatgaggcaagcctaaggacaaaaaggaaggccttgcagcctgtattctggataaggaattaaaagctcagttaattgaagccca

SEQ ID NO: 1523 - DNA, 38771 bp, Homo sapiens; identical to SEQ ID NO: 1183
  misc_feature (7892)..(9416): n equals a,t,g, or c

SEQ ID NO: 1524 - DNA, 945 bp, Homo sapiens
cagatttcctgagaagcctcttatcacagccagcacagacatctgtgcctttcctcgcctgagatgtcaccagctcagggccactccctgccccagccagatcaatgggcctttcacggcttctgagggtggatcctaggagtgcccctgtgacgaatgctcagatgactgcctctctaggatttctgtttgtttctgcttcgcagtcttccctccacccagaagctcccgaatgtccaggaagaattgactaattctctccatgagtttcttgcccacaggacgaatggagccattgctgtaacaaccttattttccactaagtcagaataagagacctggacagaaagagagtaatggctgaggcacaaggagcgagtattttaaatcaggcttatgaatgtgctctgtggatacggtttgcccatagggaggtggttttgggggttgcgaatcatactcaagctgtccctgaccgactcaccagtattctacaaacttactacaaacctctcaaaggaccatcttggaagacactagcaagggcgtgaacaatcccctctgacgttgctggctggtggtggaggccacggagcctccctgtgtgagactgtactatgtggtcactagaacgttttgaaagacagttctctgcaggcccggcaccgtggctcacgtctgtaatcccagcattttgggaggctgaggcgggtggatcacgaggtcaagagatcgagatcaccctggccaacatggtgaaaccctgtctctactaaaaatacaaaaattagccgggcgtggtggcgggcacctgtagtcctagctactcaggaggctgaggcaggagaatggcgtgaacccgggaggcggagcttgcagtgagctgagattgcgcaactacacttcagcctggcgatagagcgagactccatctcaaaaaaaaaa

SEQ ID NO: 1525 - DNA, 5775 bp, Homo sapiens; identical to SEQ ID NO: 1187

SEQ ID NO: 1526 - DNA, 738 bp, Homo sapiens; identical to SEQ ID NO: 1188

SEQ ID NO: 1527 - DNA, 352 bp, Homo sapiens
ctagaaaggggcctcaaccatgattatgagttgtctgtaaacctggaccagagttcaggtctccggatcctccatcaggaaatcacagggtggggtgagtaacatgaagccggcttccactctgggatgtcagattcctggcatggggtgatgcagggggcttggaacattccagaggaaacaaaagcgagatgagcagagacaaagagctgtgaacaccaggttcaaaatgcatgagtgagggtgttggaaaacttcccaggggtggtggctgcccaagtcaaaggacaccaacaggaaatgcaaagtcccagggtcccagggctagcaggaagctttgcctccaggctgt

SEQ ID NO: 1528 - DNA, 177 bp, Homo sapiens
aaaatacaaaaaaattagctgggcatggtggcgggcgcctgtagtcccagctacacgggaggctgaggcaggagaatggcgtgaacccaggaggcggagcttgcagtgagccaagattgtgccactgcactccagcctggatgacagagtgagactccgtctcaaaaaaaaataaaa

SEQ ID NO: 1529 - DNA, 20113 bp, Homo sapiens
gcccagcatgccccccatcgggctggataacgtggccacctatgcggggcagttcaaccaggactatctctcgggaatggtgagtccagctctcctgctgaggcagccctggggccacacctgcgtggccagaggaatcaaagctgctggcctctggggctccagagttgtctgtgtgtgtgttgctgtggtttgtagtgtgttgagctgtaccttagaacagggttttcatcaggcttctgccacctgctctctgcccctctctgggtctcacttttcccatctgtaaaatgaggggaaggggaccagatgatctcacaggtccctttcagccctgaggggttagggttgggaaggtggcgagggtatctgcatgagtgtgcatgcacgtgctatgtatgagtatccacattcatatacctgcatgtgcatgtgtgtacatatggagggctcttctggttaggccttggtgggtgtgtggcaggtatcttgggcagacatgctactttttaaatttgttgtttcacttttaaaataatacattttatgatttgaaaacaaacatatgcttagtttatgatttgaaaacaaacgtatgcttagaggaaattatgcaaccaatacacaccctaatttgtgccaggcccagttctaggcactggggatatgtgaataaaacaaacaaaaatctcagccgtgctgcacttatcatctatggggaaaagacaggcagtaccttaagtcaacgatgtgatgttattgaaagtgtaggtgccataggaacaagttgaccagggtaaaggggtcaggagtgggggtggggtgatgtaaggataatgattttaagttagcagtaaggtgggtctggctgaaaagaggatgtgtgagcaaagacctgcatcaggggaaggaagtgctgtatggatgtctagggaatgccggtgccctgaggtgccaaggggtgtgaggtgctcagggacagggaggagaggccagtgtggctaaagtggaaaggcgagggggtgagatgggaaatgaagtctgggggtctagctcttgcagggtgtaggaggctatccatcctaaggatttaggtttttattcctggtgagtgcagattcacctgaacatgcctgccagaggtgtctgtgggtagcaggctgatgtgatggggatgcccccaaccctgcatatgggacccacgcaccttcttgggcagtgagctcttaaccttcacccaggtggtctgggatgggaggagcaaccatgtggagagggaaggcatctcccctgcagaaggggatgaggatctctggtttggatcgagtcgcactgttcactggctgtgtaactttgagcaagtaaactcattctgtggtctgtgaaatgggtataacggtacttcatattccacaagcggagatgctgtgaggactgacttggcttaggtatgaaaaagggtggagggacggagtgcagcagggcccattggcctcaggctctgctttgtgtccttgcaggcggccaacatgtctgggacatttggaggagccaacatgcccaacctgtaccctggggcccctggggctggctacccaccagtgccccctggcggctttgggcagcccccctctgcccagcagcctgttcctccctatgggatgtatccacccccaggaggaaacccaccctccaggatgccctcatatccgccatacccaggggcccctgtgccgggccagcccatgccaccccccggacagcagcccccaggggcctaccctgggcagccaccagtgacctaccctggtcagcctccagtgccactccctgggcagcagcagccagtgccgagctacccaggatacccggggtctgggactgtcacccccgctgtgcccccaacccaggtgagtgtcagcccactgcctcccttggtccaggcctgggccccaaaggctggagacacatggctcagtagatggggagacagggaaaggcgcaggcctccagctgcacttcttgttttaacaaatagtgtcggccgggtgcagtgactcatgcctgtaatcccagcactttgggaagctgaggtgggcagatcgcttgagcccaggagttcaagaccaacctgggcgaaatggtgaaaccctatctctactaaaaatagaaaaaaaattagctgggcatggtggtgcatacctgtaggcccagctactcgggaggctgaggtgggaggatcacctcagcccaggagacagaggttgcagtgagccgggatcatgccgctgcactcactccagcctaggtgacagagtaagacccagtttttaaaacaaaaacaaaaacaaaaaaagacaaacaaagagcgtcaccttcttgcagactccccacctctgggttgtgttgcttaaggcccaagggagctgtcctgtttctcctggtgtgatgagacgctccacatccgagttgggtcagaacacccctggcgagtactccttattcctctgtgtcatttactgcctgggctgtgtgttttgtaagaactgcccaggccacctgtctcaagactttgtgctcaacagctgtcttcggtcccttgatatgcaccacccccgccccccccggcacagacaggttttggaggattattaaaattccctttgggtagggagaatgttggcagttcctccagggttgatcttggctcattttggagaacagttcgtgtttgcagagcctagaattcgttgtcatggttctgtggcccaaccagccagcacaggggtagtggtatgtgctcaatgactatttttagacagagggtctcctttcctccttcccttccatacccacacgttcccccaccctgtgccatcctccagcctccctcccttatcttttccctgagctgccctcttaattgtgttataaccagtttgtaccagcccctaggaagacaatccactgggagacagtttagcctggaaagttccagtttgcgggtttgtgcagctatcagggtctggaggaagtccggcagatgctagtctagagaacagtgcgagggaaccagtgctagatcaagaggtcatcaggctgccatgcacagttgtggaggctcaatacctgcatccactggaggggacacatgggctagccagccctgttaggagtacccatgtgtgctcacatgtgctgtggaggccaggcatcgatgagagaggccacagcccctgctcccgagacctgcccttcatcaggagcctgagccccagccctggaggacctgggcactgggcagattttcagcatcaggactcagctataggtgagctcccagccactggagccaggaaaaagcttcagtactagaacacaaggccagataacagtcaagttaggtagacgcggcgtaaagtcctctgcattgttgactgtggactcctttagatactccaactcttagagaaagggctgttcccagagtctaggggtggagcagccttgaatgtggggaaggcggcatgcacgacatcttacctgagactgtttgtccgagtagtttggaagccgaggcaccatcactgatgctcccggctttgaccccctgcgagatgccgaggtcctgcggaaggccatgaaaggcttcggtaagagaccctgggtggctcaaatcctactccctgccccctatttcccaggcagtttcactgtggctctgtgggctggggtagctgggggacgctgacctggccccagtggtgatagaaggtggatgtgggggtatggctagcatgcccagaacagttgaggggcccaggccagggaagtctcagctgcagagcatctcatgacccctacccgacccacccctgctgcctcttcctccagggacggatgagcaggccatcattgactgcctggggagtcgctccaacaagcagcggcagcagatcctactttccttcaagacggcttacggcaaggcgagctgcggggtgggggcgcgggacagtgaggcgtgtcctgggctcagcacagccctgctctcccctgcttttccttgggtgggcccggatctcccggatggacagtaaggagcaggagggcatttccttctgcccatccagctggtggcatcgttgggaggtgaaggatgccaccgggtgctgaggtttgctgagaggctccagacatctatccctgggttctagcccttgctctgccacatctcactgaggttgtggccacatcattttccttcccctgccctcttcatgaccaccctggggggtttagctgatgtaagagctttgcagggaaaggctgtgagtgctgcccaagtacgaggggcgtgtatgagcatattttgaacttctggggttttgaatcttagaaagataaaaattcggtaaatattgattagattcgtgttctagcccagtgcttctcaaacttcattgtgtcaccgatcccctgggcatcttggtaaaatgtggtctctgatttgggaggtttggggcagggctgagagcaggcttttctctcaggcccctgggggatgtccatgctgctgttcctcaaatctgggatatggctcttattagtcacttcctgtggattttttaaatagacttgtttttttttttgttggttgtttgtttgaatatccaatcaggatttgatcaaagatctgaaatctgaactgtcaggaaactttgagaagacaatcttggctctgatgaagaccccagtcctctttgacatttatgagataaaggaagccatcaaggtgtgtacgtgtgtgtgtgtgtgtgtgtgtgtgtgtgtgtgcgcgcgtgtgtgcgcacgcgcgcatgcgtgtggacacacagcccagaaggaggcctggatggcgtgctgtgttctagcccactcattagctgctgttgtcagtatggctcccaggccttcctgggttggagtccacatgctatagaaaagggaactccctgtgatttccccaagaggcaaatgacgcaccagtcatcatcagggaggcttaagtctctctccatcttaaagaaaagggggagctcgggtttgaaggttgcgattctgtggtaagaagaggggtaggaggccatggttggtatcgttctcattctttaggactctgttactagcaaatgacagaaacacacttcggtttaagaacaacaaaagtggagaatcagtcatgtgggtaaagagggcccaggccagacgtctctctggtctctgtctctcctgagcgcccgcttttctgtcagtttctgtgcttctcctaccatggctgcttcatgtggggtgggagagggggcctgtcgaccactctccgcataactatgagacccagctccagaagagaccagcagggtctccaaacgggcaggttctgacgggcccggcttggactcactgttccctccagtcctgcgggttttgactgagggttgggtcctgtccattctgtgcagtcccacagctctgtgtgcaccctgcaggcaggggcaggcagctcccttggaaagggaatcccatgagtcaggctggagcccagaaggagcctgtcactcagaggcctgataagcacagtgaatgttccctccttcaggagaagcagagacttcagtgtggtggcctggaaaggagaggggtctccgctgaaacacatctacatgtgttattctagggagggggtcaggaggccatcaggcagggcgatggcccggggccccagggagtggacccagacatctccctggcccccgtcttcagccggagtcatgagctggtggttgtggagtgttagaaaccacacaggtttggggcagctgtcactcaccagctgtgtgtccttgagcacctgtgaaatggggacagtggatgctgtctcaggacatgctgggaatactgggtgaggggctaacgtgtagtaacccaatagtagctgtagcaggaaacagctgacacaatgtcgcacgtcctgcctgacaggccctaagtgctctacgtacattaactcacttaatcctcatgactttcctgtgaggtaggtcctagtatcactcccatcttacagacaaggaactggaagcacagagaggttaagtaatgtgcccgaggtcacacagctggtaagctgcagagccaggattcaaaccaacatacaagccaggctgcccagcctgtcctctatggtcttactgtccctggcgtggttgtccgattcatccttgttgttcctaccttttcctagttgttttcagacattccaccatcccctctaggaccagggtttcgtatgtccacttggatctctcttgctttttacccatttttttcagttgttgtcatctcgcttccggctgaactctgaataaagcaggcctcggtccacattttaacccaaccatttactgtgtggcctcggaccagccagtacccctctctgatgctcagttttctgatccatggggatgcccctttgtgtgagccctactcatcaccactgccactgtcattgtgcttgcccgggctgtggagaagagctgatgccctcgagcctgggagtggctggagggtgtgtctctgtgtcaggggcctctgttgctgggattaaggcagcagcgtagcccccacccttcttcccgagtgctggtgaggctgctggaacaagcacatggttggttgtattctctgcccctgcagggggttggcactgatgaagcctgcctgattgagatcctcgcttcccgcagcaatgagcacatccgagaattaaacagagcctacaaagcaggtgaggccgctccctctgccctctgccctctgccctctgcagatccctgtgctcttggggctgtggcctcattctctcctagggccttttactccttcctggccttcttatcaacccatcttctgccacccccaatactttgggctttgacccaagacccagcccttccttctgtttatacatggtgcaaatgactaatgtaagggagaggcagggaaaacctggatgtggtttgggccaaggctgactagaggccaggtcagcctggaggtcacaggcttgtatatccctggagggccatatgggctatttgttctcttgagcccgagccaagacctccagcctttttctccccagtacccacttttgatagtgttttgcaatgggcagctccataaagagagctacaggatggaccttccttgcttctccctttcagaattcaaaaagaccctggaagaggccattcgaagcgacacatcagggcacttccagcggctcctcatctctctctctcaggtacttttcccacgacagggctcggggcccccaagccatggaagtcaaagagatgggatccccgcaatgaggaaagggaaaataaatggggaaggagtgggcatgaccatacacctgcttcctttcagggaaaccgtgatgaaagcacaaacgtggacatgtcactcgcccagagagatgcccaggtgagtgtgatggccaagcccctggacttcctaaagcagggatgcaccccgctttcttgcttcctgagagaggtaccctagggtggaaagaacaatagataagcagtgggttgcagatgctgtgagtttcagacgcgctgaactgttcaactgtatgacctagaacaggtaatctgacctccagggcttcagcttccccacctataggagggaacatgtgagataattagtatttcgatagttgatagatcatggttttggacgtgggattttgtgtgacagcgtactttccccatgtttagttgcacatagcattatgtttgcaaaggggcaaaatttgcacttgcttattaagtttttgaggatttgagcctagaaaccagctgccacattagttgagcacccttagaattctgtcgttgtccctcttgtgagttgcagacaaaaggggaaaagtccaagcaaagtccaggcatctgagctactctctcgaaaagtttgggtttcccactaatgaatttcaaccgtagtattatggcagggcagagccattacttcctggtggggtggagttggccatacctctctgtctcccttcactgctcttgtcatccacggcagggcattcaccaggagctgccagtggtctaaattatctctaccatctgcgggattggaatgagacctcaaggaatgcccccttgttagggctggaggagagctactcctctggtctggtccttttgctggtcctccttttccggaggaggaaactgaggctcaaaaaggttgagcactgttcccaactgaaagctagaagcagagcccggacaagggcctatactcctggctcggtcttctgtgcccagtcagcacttgcctctgccctggtctcagacctgctgctcctgcagggtctgccttattcagtgtctctctggctggtaacatccattcccattctgggagtcagggctggacacgcctggggctcagggctctggcttttgctccagcgagagttttgcatgccacttttagcggggcaaaaattgtctcatgctctgccttctcagtccagagctgctttggcctcatcttgacctgtgggatctcagcccctgattgctgctttctgctctttttcagggctgctacctgaggcctagcaggcactttagaggccatctagttcagaggttgcaaattggcaaatactttaggctcaaaccttcagaagtttaccaggctctcctgggtgacctgggcctggggtctgggtgtggcctgtgccacatgtgcgtcttcctctctctccaggagctgtatgcggccggggagaaccgcctgggaacagacgagtccaagttcaatgcggttctgtgctcccggagccgggcccacctggtagcaggtaaggcaggctggggtccctcagaggccagttagatgagggcagtcaggggattgtggggaaacaaagctatgggaacacttggtcgttcctccctgcgtggggctttcgcctcctcaaaagagccccctggtgggaatttaaaagacactgtcagagggtttcctgagttctggcaaacatccagttctggaggttctaccggtgtagaaacctggtgtctttgtacgtgggaatgtggaacgtcagagttgggagggtccttcgggagcacccaatccagtgttttccaaagcctggcataagaaacagtcataacaataaaactgggtgccattcatttactcattcattcaacagatgtaaatcgcgctcccgcatgggtcagtctgtcaggtggtggagcaggtgtggggccacggtggggggcagggcactgcagagtgtgttccatgggctgcactttctcatttggggagacagacagtaaacaacaatgaaataaaatctgtatcagatgggaaatcctgtagaggaaaatcaagctggaaacaggtagggagtgatggtagggtccaccgggaggtgcttgggccagtccccactgaggtcgtgacatttgatttaaaaacctaaagggagatgcaggggcagaggcctgcctggggctcccagcacgactgagaacagtgaagggggaccatgtggagcaggtggagtgagcaagaggagtgggaggtgagggcagagaggggagagggccctgctgatgacttcccggagctgggtatttatcctgagcaaaagaggaagccagtggagggccctgagcagaggaggctgtgcagaatccctggctgtggtgccgagaatggagtgaagggtgcaaggccaagcagcgaagcctgtcgggaggctgctgcagggacccggggaggaatggtggtaataggggcttgtggtgaggaggtgtcaggttccggccatgtttgctgatgaattggacacgtgacgtgtgggagagagagggttcgaggattatacagggtttctttaggccaagcagtgggagaatggccctcaactgagacagggggactgtaggtggagctggctttaggtgcctgtagggtggagctgcagggaggctgctgggttgctgagtgtggaggtcaggagaggtctggcctggttgtggaaggtaagggagctatgggtagttgaagttatctgaggctctgggactgcaggaggtcccctcaggagggagactgtggggagcccaccggtgtgaggagactaagaaggagcagctagggagggaggaggacgcagaggaagggggtcctggaggccagtgtgaggtggcaggcaaggactgaggatggtgaccacacggagcaactggtgggctgtggccagggctgctccagtgggcagtgagggtgaaaacccagcgaccgctctgtgctgcacacagagacaggcgctgtggctctccccattcgcagctgtgaaagcaggcacagggtggtagaggaagtaggggtgcacagctagtaacagctgagctgggatttgaacccagaccacccgaccccagagcacactttttaacctctgcactatcctgtaatggagcctgagtgaaagcattttcatcttaatcattatttcttttaatgagtacagaacatgtaagtagtgcatcaagcccatggcttcacaaacattattacttaggagaaaagagtagctgattggaagaagatattaattgagacagatacacacagagcagaaatcacaactttaaaatgcaaatggtagctgagactcaggctggggaaggagagttttatgtcctgggtcagaactggagtcaggaccaaggtctccatcatgccacctgtctctctaggagccagccatccactcctgtgggtgcttagcgtgtcctaggtcgaggtgagcagcaagaagccaggctggctggggcaggctgggcctcagctcacaggcaggctgaggaagacagatggatgcatgaataaagccaaggaatggcagagactggaggtgtggaggatttgacaagagggaaaaaatgtcttggagtacataaaagtggccctggaggggtattaaggtgcgatttggttaagcagattggcagtcctgagaaagggaccacacagggagggacatcaggtggtgcatgtaacttgtgacgaagactctgacttccttgagcgctagcaggcctggggacgtgcagggtgtgggagcagagtggcaggtgggagattttggggcagaggccacctcatgtgagtcctctgttagtctgctcatgctgccatgacaaaataccacagactgggtggcttaagcagcagatactcattttgttacagttttgaaggccagatatccaagagtggggtgccggtttctcccgtggcctcttcgtgacaatcactgtgctcacatggtctttcctctgcatgtgcacatccctgggatctctgtgtgtgtcctaatcttctcttcttctaaggagaccaggcgaattggattagggtacaccctagcagcatgttttaacttaattacctctttaaagatcttatctccaaacacggttatattctgaagtcctgggagttgggacttccacatatgaactttggggagacacatttcagttcataatataagcctctgtcatccccatagttttcaatgagtaccagagaatgacaggccgggacattgagaagagcatctgccgggagatgtccggggacctggaggagggcatgctggccgtgggtaagtgtctcaggtttgccgcccacctgccaggggctaacgtgtatcgtgagtgttcaggctgctcgcctgtcctccagctgatgggtgacaccgtgaagggaccacaggatccaagatcgctcagcccagagtgtccagatgctgggaagtcatgctgcttcccggttccctgtgcagttgaacccctagctgtcctggaggtgtcttgtgtgtgtttgcggtgcagctctggagtagggaactgcagtgtgggtattagtgggagggcatccaactgcgctcccggaggagtatgactcatatcctgccacgtttcctctaaaaatacatccctgcaggcagttgtcagatgtttgtgatggaaacacgtggaaagatttttacttgcagcagcgaaacaggcccatgctgaggaaagctggcttggctccaggatggtggtgtgcctcttacattgcccatgtcctctagcagggccctcccactgtgcagagttgggtccctgccctgaggccctcacaacccctctttctactcacttgggaaaatcagtctgccccttttttcattatgctttttttggagctttctggatgggagagatggaaaatcctcatttccctgcctgtcccccatagtaggtctcatggcctgggaagcctagggagatgcacattccactcagccacggtttctccatgacggtcatggcctctccagtctgcccctcctgcctgagcagcagcacagttcctcatcaccatccacattgcttccctgtgtagctcctagccccactaagacccccgcccctctgactcttggtcctttcaccgcagtggttgccaggaaagagggtgggttggtttccaggctttgcgtgtttctgttccaaatagctggagccaagatcatgggatagttgagcctggaacagaaggaggaggagaaaagatggatgcagtgatgggtttgacatctgggcctctaagaggacacttgtagactccatgccctgcttgggctgagaattttctgcagatctggttatgccgagtttctctcttctagtgaaatgtctcaagaataccccagccttctttgcggagaggctcaacaaggccatgagggtatgtaacttccatgtgcaggttgcgatggaaccttagcctcgcctgtgcctgggaccaagggctgagggcagaaggcctggggagagctaaatctcagctgagagttccgaggacctgggtagggaggggactggagggcccagggcaggtgggaaggtgaggaggcctggtgctcatgctcttgggtggactctctttagggggcaggaacaaaggaccggaccctgattcgcatcatggtgtctcgcagcgagaccgacctcctggacatcagatcagagtataagcggatgtacggcaagtcgctgtaccacgacatctcggtacgggcctgctgcaggccaactgggctcccttttggcatctcagtcacctgtggaacctccctccttggagtggccatatgcttggcctctgtgctgtgtgtgggcatcttgattatggacctcggacttgttcatccccttgcccttaaacagattataaatttctgagggcaggtggatcatgaccttgctgtcgcccccaccttgcatcccccagcagcatcagagaacactcgggacctccccaaccttgaccgtgaccttcagcgttccgatcaccgtgtgattccttgatctgtcagtgagaactcatgtcccaaaggctctgtggagctctgctgtcactccctgacaaagcacttcctgcactcagctttatggcgtaggccacatagtaaggccgttcagagcgagggccctgggggtcacgccacttggagtccagcttttctacttgctaactgtgtgaccttgaatggctcccttaaatctccctgaaccccagctccattgtctttaagatgagaaaataatcgttccttcctgggaatgttgtgagtattgagtgaggcagtgcaggtcaagtgtctattaaacactagccacagttgtatcgctgtgtggcagagccagtctgacaaaatacattctcagctgtgtggtctaacgctcaaattctgaactcacatgagccttgcaattgcaccatggggaccacgtcctcccaccttagactcagtagcatttgatgatggtgggcatgtcatcacaggaaactcactgtgtttccttggctgtatgaatgaagctgttgttagagaattagtgattctaggctgggcacagtggctcacgcctgtaatcccagcactttgggaggctgaggcaggtggatcatttgaggtcaggagttcgagaccagcctggccaacaaggtaaaaccctgtctctactaaaaatacaaaattagctgggcttgcctgtaatcccagctaattaggtaggctgcggcaggagaattgcttgaacccgggagacagaggttgcagtgagctgggatcacgccattccacttcagtcttggtgacagagtgagacttcgtctcaaaaaaaaaaagagagttaataattcattacagagtatctcctgcatgccagcaagctatggacatctggaagaagccacatgccttgccctcaagttgcttagggtggaaggaaatgattagaaatgagccaagccgagcctgcactcttagagtaagtgtagtggcctcagacagaggagagatccctgggacctgggcagtctgagccttccactggacagtcatgtgtgaggagattgcatttcctgagcaggacactgtgttgcgttacattggtaaccccaatttaaggcagcataaatgcactgggaaaacagcaatattggttagccctgggaagtggtttttaggatgattataatttttttttgtgggtattcatttgatgtggatagctggggtgagtgctgctttccgtcttctgatgggggcctggagaaggctgaactgcattttttaaggtctgtgacgcctgctgcaggacctgcagtgggagaaaattccccagggtggggctttctccctataagggtgctcagggctgaatatcaggacccagaaggctgaaagtgactgtccctcccttaacggatgtcttccttgtttctgtggccagggagatacttcaggggattaccggaagattctgctgaagatctgtggtggcaatgactgaacagtgactggtggctcacttctgcccacctgccggcaacaccagtgccaggaaaaggccaaaagaatgtctgtttctaacaaatccacaaatagccccgagattcaccgtcctagagcttaggcctgtcttccacccctcctgacccgtatagtgtgccacaggacctgggtcggtctagaactctctcaggatgccttttctaccccatccctcacagcctcttgctgctaaaatagatgtttcatttttctgactcatgcaatcattcccctttgcctgtggctaagacttggcttcatttcgtcatgtaattgtatatttttatttggaggcatattttcttttcttacagtcattgccagacagaggcatacaagtctgtttgctgcatacacatttctggtgagggcgactgggtgggtgaagcaccgtgtcctcgctgaggagagaaagggaggcgtgcctgagaaggtagcctgtgcatctggtgagtgtgtcacgagctttgttactgccaaactcactcctttttagaaaaaacaaaaaaaaagggccagaaagtcattccttccatcttccttgcagaaaccacgagaacaaagccagttccctgtcagtgacagggcttcttgtaatttgtggtatgtgccttaaacctgaatgtctgtagccaaaacttgtttccacattaagagtcagccagctctggaatggtctggaaatgtcttcctggtaccaacttgttttcttctgcttgattctgccctgtggctcagaggtctggccttatcagccagtgaaagttcatgtaaccttacgtagagatttgtgtgcaggaaaccctgagcatacactagtttgcagggactcgtaaggacatgggaagggaggttcccgaaatccaggcaggaggcccagacacctgaaaggcaaagggatcttggttggttgcaggtgcagtgaagtccactgaaggtgtggtgcgaagaatgcagtccttcacccaggtcccaggagggaagaagggtgtgtgctaattcctggtgcccctcggcgggggccagagagaaggatggggacaacccagagagtcacaagaccagtgcctcccctcagggtgcctccaggctgaaaggggctcctggctctggtctctggggaccctgtgcccgttggttggtggtgtgagggaagagaatccataagagagtttctgagaattatggtgtcatgtccagaagctagagcttaccttgcatcaggggtctccacccactccttttccaacctcctgcgttgaggtttagaaaagagagaatcgactaggcactatggctcacgcctgtaatccaaggactttgggaagctgaggtgagaggatcacttgagctcaggagttcaagactagcctagccaacagcgagacccctgtctctactaaaaaatttggccaggcgtggtggctcacggctgtaatcccagcactttgggaggtgaggcgggcagatcacctgaggtcaggagttcgagacccagcctggccaacatggtgaaaccccatctctactaaaaatacaaaaattagccaggcatggtggcacattcctgtaatcccagctacacaggatgctgaggcaggagaatcacttgaacccaggaggcagaggttgtagtgagctgagatcacaccattgcacttcaacctgggtggacagagtgagactctgtctcaaaaaaaaaaaaaaatttacctggcattgtagtgcattccctatagtcggctactctggaggctgaggcaggaagatccttagagcccaagaaattgaggccgtagtaagctgtgattacaccactgcactccagcctggacaacagagcgagaccttgtctcaaatgagaaaaaaacaaaaagaaatgggagaatccagagagactaggctagatcaagcctgctgggtcctggcaggagccccagggagtagctcatctgcagacatttgcttgaggactaccccctaaacataaaggaagaatgacatccgaagggtgtggagcagccatgagctgagaactagcctggtctacctgagattgatggcaggtcctggtcaacacgtcagctctgcgtcagagtccatgcctcaagcccaagctgaagccccatccctgctgctctcccaagaactcctctgctaggccaggccccttgcccttgggtgccaggtgggacctgcctgatgggatggggtgcttggcatatacaacttgccatgaactcccgccgcaaaatgggggcctcctgaaatagtgaggggacactagaaccaatgtgctctgatgtgaccatattctgtgacattaccatgccctgtttactccaaagttcccagcctggtgcccagcaggcaatattgcacctacagacacatttactttggtttccaaagtgtttttagacatttgaatttgttgccaacatttaaacattgagagatttcatatttttaaaaatctggaattctggcttctcttgaaaactcagaaattctggcactatggggcttgcattcctgcatggctggagctgagttgcagctgcccctttaggcctgtactccttatttgctataggctccgtcttgtattacactaagcccatgtcacccatttggctcctgcaggcctttgggtttgagaccctggtctacacacttggagaccacctgttgtaaagtacatggatgtgctttggtcaaggaatagaccaaggtggatatccaggccagagtgactcagcgagtttaggtcacaggcgtatactccacttgttatataacctgcttgtgtaagttcatacttggctcaaagccactattgtttggaaaaggtataactgccctgctgacgctgtacagatgttcttgggctcggatgggcatggctccacgtggtgtgcactagcacccagagagagtgaagctattgacccctgtaagggagagtgaccatctggcagatagatagaggggagccaggacatggctcagcttgtgcccagagggagagttaagccgctgaccctgtagccagggagtgcacctgcaagcatgggggtggcaggagccacagagctggctgctgagaggagctgcagatctggagaagacagcctaggtaaaggtggacagtgtgagagctgctgatgagatagctgctgaataaaactacattttacctgcctatggcccgccaggttttctttcagctatcgcccatccacccagtcccctcgaacctcagcatgggctggaacctgaccctgggcatgacatttggcatagttgtggacctgacacctgtgtttgtcctagtcctgtttctccctgccttcctgttcctctcgctgccctcatggtcactcccaagagatccaacccatgttaagtatgggctggaggactgcatgaatgcctcatgatcttcccagaggcaaaggcacctactgccttccaaggtcagtgggaggttgggatcaacactgtttattatgcttaggacaaaaaagatagggagaaagatgtgcaaccttacaggtcatctttctgggatagaacacaatgggtcttctcctgcctcctggatatgttagtcaaggccagtccatgctacacatctagtctgacttctaaaatagaagcaccagatgaattcagccctgagagaattttcagcagctgtgggggcgctggaggaaacactattaaatagttttgcacctgagacagatagcctcactcgcctcaccctagtcctggtggcatttgtctcaggtgcaaaatttaagaaagaaaccttggagtgctcaccctgtggctgggtagatggtcctaaagtggtggttttcaagcctgagtgtgtatcaggatcatcaggggagcttgctaaagagcagttcctgcggtcagaccctcatgcattttgagcaggtgtggggactgggaaactgcatctgtaacctgctgtaatctaacgcttatctaaatactactgtgctcacacagagaacaccgcaaaagtagaggtgttcctccagagggcaggtgagcagatggcacagtctgcttggaattcagtcaggtgatgagagatgagatgaggcactcctagctttgggaagagggagctgaaagatgaacctttgcaggtgcccacggtcaaagtggtggtttaatgccatgccatgcccattttctgttggccttggcagggagttacagccctaccttaggacctggctccttatttctgctgtaggctctttcctgccctggccgagatggagtggaatgagacctagaaacatcaagctaaatacatgtcctcagaaagataaaggtttacattttcacccccatcaaatctgaaagctctctgcctgtgtttttctaagggatagggacatcattactcagtccacaacctggactcatgtagggtcccctgtcagtaaaggagtcagtcaagcccaccaggtataccaaggactcttaccctcagcccctactccttggaaagctgccccttggcctaatattggtgtttagcttgagcctgactccttctcaacactaagagctgatgaagtcctgaagcagaaagagctctgacctgagagtcaaacatccttattctgatctcagctcagcccctgatttgttgtgtgaccctggatatgtcacttcctgtctttttgactttttaaaatgaagggtagactagaggagagcttctaaaactttaatgtggtcaacgaaatggaataggaaattccacaagtctgtccttccacaaaagcagcaaataaggtggcaaaaactcaaatttatgggaactctggaaacgaattgaaagtttacagcaatcaggtgaatacctaagaataaaagctggatttagtaagagagctttgttgtgttttagcttaccctggccccatcccccactccccagcatggcagcagcatcaaaaacaatatccctcattccctgtataggttcctgtcactggaggtagcagatta

SEQ ID NO: 1530 - DNA, 20110 bp, Homo sapiens
gcccagcatgccccccatcgggctggataacgtggccacctatgcggggcagttcaaccaggactatctctcgggaatggtgagtccagctctcctgctgaggcagccctggggccacacctgcgtggccagaggaatcaaagctgctggcctctggggctccagagttgtctgtgtgtgtgttgctgtggtttgtagtgtgttgagctgtaccttagaacagggttttcatcaggcttctgccacctgctctctgcccctctctgggtctcacttttcccatctgtaaaatgaggggaaggggaccagatgatctcacaggtccctttcagccctgaggggttagggttgggaaggtggcgagggtatctgcatgagtgtgcatgcacgtgctatgtatgagtatccacattcatatacctgcatgtgcatgtgtgtacatatggagggctcttctggttaggccttggtgggtgtgtggcaggtatcttgggcagacatgctactttttaaatttgttgtttcacttttaaaataatacattttatgatttgaaaacaaacatatgcttagtttatgatttgaaaacaaacgtatgcttagaggaaattatgcaaccaatacacaccctaatttgtgccaggcccagttctaggcactggggatatgtgaataaaacaaacaaaaatctcagccgtgctgcacttatcatctatggggaaaagacaggcagtaccttaagtcaacgatgtgatgttattgaaagtgtaggtgccataggaacaagttgaccagggtaaaggggtcaggagtgggggtggggtgatgtaaggataatgattttaagttagcagtaaggtgggtctggctgaaaagaggatgtgtgagcaaagacctgcatcaggggaaggaagtgctgtatggatgtctagggaatgccggtgccctgaggtgccaaggggtgtgaggtgctcagggacagggaggagaggccagtgtggctaaagtggaaaggcgagggggtgagatgggaaatgaagtctgggggtctagctcttgcagggtgtaggaggctatccatcctaaggatttaggtttttattcctggtgagtgcagattcacctgaacatgcctgccagaggtgtctgtgggtagcaggctgatgtgatggggatgcccccaaccctgcatatgggacccacgcaccttcttgggcagtgagctcttaaccttcacccaggtggtctgggatgggaggagcaaccatgtggagagggaaggcatctcccctgcagaaggggatgaggatctctggtttggatcgagtcgcactgttcactggctgtgtaactttgagcaagtaaactcattctgtggtctgtgaaatgggtataacggtacttcatattccacaagcggagatgctgtgaggactgacttggcttaggtatgaaaaagggtggagggacggagtgcagcagggcccattggcctcaggctctgctttgtgtccttgcaggcggccaacatgtctgggacatttggaggagccaacatgcccaacctgtaccctggggcccctggggctggctacccaccagtgccccctggcggctttgggcagcccccctctgcccagcagcctgttcctccctatgggatgtatccacccccaggaggaaacccaccctccaggatgccctcatatccgccatacccaggggcccctgtgccgggccagcccatgccaccccccggacagcagcccccaggggcctaccctgggcagccaccagtgacctaccctggtcagcctccagtgccactccctgggcagcagcagccagtgccgagctacccaggatacccggggtctgggactgtcacccccgctgtgcccccaacccaggtgagtgtcagcccactgcctcccttggtccaggcctgggccccaaaggctggagacacatggctcagtagatggggagacagggaaaggcgcaggcctccagctgcacttcttgttttaacaaatagtgtcggccgggtgcagtgactcatgcctgtaatcccagcactttgggaagctgaggtgggcagatcgcttgagcccaggagttcaagaccaacctgggcgaaatggtgaaaccctatctctactaaaaatagaaaaaaaattagctgggcatggtggtgcatacctgtaggcccagctactcgggaggctgaggtgggaggatcacctcagcccaggagacagaggttgcagtgagccgggatcatgccgctgcactcactccagcctaggtgacagagtaagacccagtttttaaaacaaaaacaaaaacaaaaaaagacaaacaaagagcgtcaccttcttgcagactccccacctctgggttgtgttgcttaaggcccaagggagctgtcctgtttctcctggtgtgatgagacgctccacatccgagttgggtcagaacacccctggcgagtactccttattcctctgtgtcatttactgcctgggctgtgtgttttgtaagaactgcccaggccacctgtctcaagactttgtgctcaacagctgtcttcggtcccttgatatgcaccacccccgccccccccggcacagacaggttttggaggattattaaaattccctttgggtagggagaatgttggcagttcctccagggttgatcttggctcattttggagaacagttcgtgtttgcagagcctagaattcgttgtcatggttctgtggcccaaccagccagcacaggggtagtggtatgtgctcaatgactatttttagacagagggtctcctttcctccttcccttccatacccacacgttcccccaccctgtgccatcctccagcctccctcccttatcttttccctgagctgccctcttaattgtgttataaccagtttgtaccagcccctaggaagacaatccactgggagacagtttagcctggaaagttccagtttgcgggtttgtgcagctatcagggtctggaggaagtccggcagatgctagtctagagaacagtgcgagggaaccagtgctagatcaagaggtcatcaggctgccatgcacagttgtggaggctcaatacctgcatccactggaggggacacatgggctagccagccctgttaggagtacccatgtgtgctcacatgtgctgtggaggccaggcatcgatgagagaggccacagcccctgctcccgagacctgcccttcatcaggagcctgagccccagccctggaggacctgggcactgggcagattttcagcatcaggactcagctataggtgagctcccagccactggagccaggaaaaagcttcagtactagaacacaaggccagataacagtcaagttaggtagacgcggcgtaaagtcctctgcattgttgactgtggactcctttagatactccaactcttagagaaagggctgttcccagagtctaggggtggagcagccttgaatgtggggaaggcggcatgcacgacatcttacctgagactgtttgtccgagtagtttggaagccgaggcaccatcactgatgctcccggctttgaccccctgcgagatgccgaggtcctgcggaaggccatgaaaggcttcggtaagagaccctgggtggctcaaatcctactccctgccccctatttcccaggcagtttcactgtggctctgtgggctggggtagctgggggacgctgacctggccccagtggtgatagaaggtggatgtgggggtatggctagcatgcccagaacagttgaggggcccaggccagggaagtctcagctgcagagcatctcatgacccctacccgacccacccctgctgcctcttcctccagggacggatgagcaggccatcattgactgcctggggagtcgctccaacaagcagcggcagcagatcctactttccttcaagacggcttacggcaaggcgagctgcggggtgggggcgcgggacagtgaggcgtgtcctgggctcagcacagccctgctctcccctgcttttccttgggtgggcccggatctcccggatggacagtaaggagcaggagggcatttccttctgcccatccagctggtggcatcgttgggaggtgaaggatgccaccgggtgctgaggtttgctgagaggctccagacatctatccctgggttctagcccttgctctgccacatctcactgaggttgtggccacatcattttccttcccctgccctcttcatgaccaccctggggggtttagctgatgtaagagctttgcagggaaaggctgtgagtgctgcccaagtacgaggggcgtgtatgagcatattttgaacttctggggttttgaatcttagaaagataaaaattcggtaaatattgattagattcgtgttctagcccagtgcttctcaaacttcattgtgtcaccgatcccctgggcatcttggtaaaatgtggtctctgatttgggaggtttggggcagggctgagagcaggcttttctctcaggcccctgggggatgtccatgctgctgttcctcaaatctgggatatggctcttattagtcacttcctgtggattttttaaatagacttgtttttttttttgttggttgtttgtttgaatatccaatcaggatttgatcaaagatctgaaatctgaactgtcaggaaactttgagaagacaatcttggctctgatgaagaccccagtcctctttgacatttatgagataaaggaagccatcaaggtgtgtacgtgtgtgtgtgtgtgtgtgtgtgtgtgtgtgtgcgcgcgtgtgtgcgcacgcgcgcatgcgtgtggacacacagcccagaaggaggcctggatggcgtgctgtgttctagcccactcattagctgctgttgtcagtatggctcccaggccttcctgggttggagtccacatgctatagaaaagggaactccctgtgatttccccaagaggcaaatgacgcaccagtcatcatcagggaggcttaagtctctctccatcttaaagaaaagggggagctcgggtttgaaggttgcgattctgtggtaagaagaggggtaggaggccatggttggtatcgttctcattctttaggactctgttactagcaaatgacagaaacacacttcggtttaagaacaacaaaagtggagaatcagtcatgtgggtaaagagggcccaggccagacgtctctctggtctctgtctctcctgagcgcccgcttttctgtcagtttctgtgcttctcctaccatggctgcttcatgtggggtgggagagggggcctgtcgaccactctccgcataactatgagacccagctccagaagagaccagcagggtctccaaacgggcaggttctgacgggcccggcttggactcactgttccctccagtcctgcgggttttgactgagggttgggtcctgtccattctgtgcagtcccacagctctgtgtgcaccctgcaggcaggggcaggcagctcccttggaaagggaatcccatgagtcaggctggagcccagaaggagcctgtcactcagaggcctgataagcacagtgaatgttccctccttcaggagaagcagagacttcagtgtggtggcctggaaaggagaggggtctccgctgaaacacatctacatgtgttattctagggagggggtcaggaggccatcaggcagggcgatggcccggggccccagggagtggacccagacatctccctggcccccgtcttcagccggagtcatgagctggtggttgtggagtgttagaaaccacacaggtttggggcagctgtcactcaccagctgtgtgtccttgagcacctgtgaaatggggacagtggatgctgtctcaggacatgctgggaatactgggtgaggggctaacgtgtagtaacccaatagtagctgtagcaggaaacagctgacacaatgtcgcacgtcctgcctgacaggccctaagtgctctacgtacattaactcacttaatcctcatgactttcctgtgaggtaggtcctagtatcactcccatcttacagacaaggaactggaagcacagagaggttaagtaatgtgcccgaggtcacacagctggtaagctgcagagccaggattcaaaccaacatacaagccaggctgcccagcctgtcctctatggtcttactgtccctggcgtggttgtccgattcatccttgttgttcctaccttttcctagttgttttcagacattccaccatcccctctaggaccagggtttcgtatgtccacttggatctctcttgctttttacccatttttttcagttgttgtcatctcgcttccggctgaactctgaataaagcaggcctcggtccacattttaacccaaccatttactgtgtggcctcggaccagccagtacccctctctgatgctcagttttctgatccatggggatgcccctttgtgtgagccctactcatcaccactgccactgtcattgtgcttgcccgggctgtggagaagagctgatgccctcgagcctgggagtggctggagggtgtgtctctgtgtcaggggcctctgttgctgggattaaggcagcagcgtagcccccacccttcttcccgagtgctggtgaggctgctggaacaagcacatggttggttgtattctctgcccctgcagggggttggcactgatgaagcctgcctgattgagatcctcgcttcccgcagcaatgagcacatccgagaattaaacagagcctacaaagcaggtgaggccgctccctctgccctctgccctctgccctctgcagatccctgtgctcttggggctgtggcctcattctctcctagggccttttactccttcctggccttcttatcaacccatcttctgccacccccaatactttgggctttgacccaagacccagcccttccttctgtttatacatggtgcaaatgactaatgtaagggagaggcagggaaaacctggatgtggtttgggccaaggctgactagaggccaggtcagcctggaggtcacaggcttgtatatccctggagggccatatgggctatttgttctcttgagcccgagccaagacctccagcctttttctccccagtacccacttttgatagtgttttgcaatgggcagctccataaagagagctacaggatggaccttccttgcttctccctttcagaattcaaaaagaccctggaagaggccattcgaagcgacacatcagggcacttccagcggctcctcatctctctctctcaggtacttttcccaccacagggctcggggcccccaagccatggaagtcaaagagatgggatccccgcaatgaggaaagggaaaataaatggggaaggagtgggcatgaccatacacctgcttcctttcagggaaaccgtgatgaaagcacaaacgtggacatgtcactcgcccagagagatgcccaggtgagtgtgatggccaagcccctggacttcctaaagcagggatgcaccccgctttcttgcttcctgagagaggtaccctagggtggaaagaacaatagataagcagtgggttgcagatgctgtgagtttcagacgcgctgaactgttcaactgtatgacctagaacaggtaatctgacctccagggcttcagcttccccacctataggagggaacatgtgagataattagtatttcgatagttgatagatcatggttttggacgtgggattttgtgtgacagcgtactttccccatgtttagttgcacatagcattatgtttgcaaaggggcaaaatttgcacttgcttattaagtttttgaggatttgagcctagaaaccagctgccacattagttgagcacccttagaattctgtcgttgtccctcttgtgagttgcagacaaaaggggaaaagtccaagcaaagtccaggcatctgagctactctctcgaaaagtttgggtttcccactaatgaatttcaaccgtagtattatggcagggcagagccattacttcctggtggggtggagttggccatacctctctgtctcccttcactgctcttgtcatccacggcagggcattcaccaggagctgccagtggtctaaattatctctaccatctgcgggattggaatgagacctcaaggaatgcccccttgttagggctggaggagagctactcctctggtctggtccttttgctggtcctccttttccggaggaggaaactgaggctcaaaaaggttgagcactgttcccaactgaaagctagaagcagagcccggacaagggcctatactcctggctcggtcttctgtgcccagtcagcacttgcctctgccctggtctcagacctgctgctcctgcagggtctgccttattcagtgtctctctggctggtaacatccattcccattctgggagtcagggctggacacgcctggggctcagggctctggcttttgctccagcgagagttttgcatgccacttttagcggggcaaaaattgtctcatgctctgccttctcagtccagagctgctttggcctcatcttgacctgtgggatctcagcccctgattgctgctttctgctctttttcagggctgctacctgaggcctagcaggcactttagaggccatctagttcagaggttgcaaattggcaaatactttaggctcaaaccttcagaagtttaccaggctctcctgggtgacctgggcctggggtctgggtgtggcctgtgccacatgtgcgtcttcctctctctccaggagctgtatgcggccggggagaaccgcctgggaacagacgagtccaagttcaatgcggttctgtgctcccggagccgggcccacctggtagcaggtaaggcaggctggggtccctcagaggccagttagatgagggcagtcaggggattgtggggaaacaaagctatgggaacacttggtcgttcctccctgcgtggggctttcgcctcctcaaaagagccccctggtgggaatttaaaagacactgtcagagggtttcctgagttctggcaaacatccagttctggaggttctaccggtgtagaaacctggtgtctttgtacgtgggaatgtggaacgtcagagttgggagggtccttcgggagcacccaatccagtgttttccaaagcctggcataagaaacagtcataacaataaaactgggtgccattcatttactcattcattcaacagatgtaaatcgcgctcccgcatgggtcagtctgtcaggtggtggagcaggtgtggggccacggtggggggcagggcactgcagagtgtgttccatgggctgcactttctcatttggggagacagacagtaaacaacaatgaaataaaatctgtatcagatgggaaatcctgtagaggaaaatcaagctggaaacaggtagggagtgatggtagggtccaccgggaggtgcttgggccagtccccactgaggtcgtgacatttgatttaaaaacctaaagggagatgcaggggcagaggcctgcctggggctcccagcacgactgagaacagtgaagggggaccatgtggagcaggtggagtgagcaagaggagtgggaggtgagggcagagaggggagagggccctgctgatgacttcccggagctgggtatttatcctgagcaaaagaggaagccagtggagggccctgagcagaggaggctgtgcagaatccctggctgtggtgccgagaatggagtgaagggtgcaaggccaagcagcgaagcctgtcgggaggctgctgcagggacccggggaggaatggtggtaataggggcttgtggtgaggaggtgtcaggttccggccatgtttgctgatgaattggacacgtgacgtgtgggagagagagggttcgaggattatacagggtttctttaggccaagcagtgggagaatggccctcaactgagacagggggactgtaggtggagctggctttaggtgcctgtagggtggagctgcagggaggctgctgggttgctgagtgtggaggtcaggagaggtctggcctggttgtggaaggtaagggagctatgggtagttgaagttatctgaggctctgggactgcaggaggtcccctcaggagggagactgtggggagcccaccggtgtgaggagactaagaaggagcagctagggagggaggaggacgcagaggaagggggtcctggaggccagtgtgaggtggcaggcaaggactgaggatggtgaccacacggagcaactggtgggctgtggccagggctgctccagtgggcagtgagggtgaaaacccagcgaccgctctgtgctgcacacagagacaggcgctgtggctctccccattcgcagctgtgaaagcaggcacagggtggtagaggaagtaggggtgcacagctagtaacagctgagctgggatttgaacccagaccacccgaccccagagcacactttttaacctctgcactatcctgtaatggagcctgagtgaaagcattttcatcttaatcattatttcttttaatgagtacagaacatgtaagtagtgcatcaagcccatggcttcacaaacattattacttaggagaaaagagtagctgattggaagaagatattaattgagacagatacacacagagcagaaatcacaactttaaaatgcaaatggtagctgagactcaggctggggaaggagagttttatgtcctgggtcagaactggagtcaggaccaaggtctccatcatgccacctgtctctctaggagccagccatccactcctgtgggtgcttagcgtgtcctaggtcgaggtgagcagcaagaagccaggctggctggggcaggctgggcctcagctcacaggcaggctgaggaagacagatggatgcatgaataaagccaaggaatggcagagactggaggtgtggaggatttgagaagaggggacactgtcttggagtacatgggagtgggccctggaggggtattaaggtgcgatttggttaagcagattggcagtcctgagaaagggaccacacagggagggacatcaggtggtgcatgtaacttgtgacgaagactctgacttccttgagcgctagcaggcctggggacgtgcagggtgtgggagcagagtggcaggtgggagattttggggcagaggccacctcatgtgagtcctctgttagtctgctcatgctgccatgacaaaataccacagactgggtggcttaagcagcagatactcattttgttacagttttgaaggccagatatccaagagtggggtgccggtttctcccgtggcctcttcgtgacaatcactgtgctcacatggtctttcctctgcatgtgcacatccctgggatctctgtgtgtgtcctaatcttctcttcttctaaggagaccaggcgaattggattagggtacaccctagcagcatgttttaacttaattacctctttaaagatcttatctccaaacacggttatattctgaagtcctgggagttgggacttccacatatgaactttggggagacacatttcagttcataatataagcctctgtcatccccatagttttcaatgagtaccagagaatgacaggccgggacattgagaagagcatctgccgggagatgtccggggacctggaggagggcatgctggccgtgggtaagtgtctcaggtttgccgcccacctgccaggggctaacgtgtatcgtgagtgttcaggctgctcgcctgtcctccagctgatgggtgacaccgtgaagggaccacaggatccaagatcgctcagcccagagtgtccagatgctgggaagtcatgctgcttcccggttccctgtgcagttgaacccctagctgtcctggaggtgtcttgtgtgtgtttgcggtgcagctctggagtagggaactgcagtgtgggtattagtgggagggcatccaactgcgctcccggaggagtatgactcatatcctgccacgtttcctctaaaaatacatccctgcaggcagttgtcagatgtttgtgatggaaacacgtggaaagatttttacttgcagcagcgaaacaggcccatgctgaggaaagctggcttggctccaggatggtggtgtgcctcttacattgcccatgtcctctagcagggccctcccactgtgcagagttgggtccctgccctgaggccctcacaacccctctttctactcacttgggaaaatcagtctgccccttttttcattatgctttttttggagctttctggatgggagagatggaaaatcctcatttccctgcctgtcccccatagtaggtctcatggcctgggaagcctagggagatgcacattccactcagccacggtttctccatgacggtcatggcctctccagtctgcccctcctgcctgagcagcagcacagttcctcatcaccatccacattgcttccctgtgtagctcctagccccactaagacccccgcccctctgactcttggtcctttcaccgcagtggttgccaggaaagagggtgggttggtttccaggctttgcgtgtttctgttccaaatagctggagccaagatcatgggatagttgagcctggaacagaaggaggaggagaaaagatggatgcagtgatgggtttgacatctgggcctctaagaggacacttgtagactccatgccctgcttgggctgagaattttctgcagatctggttatgccgagtttctctcttctagtgaaatgtctcaagaataccccagccttctttgcggagaggctcaacaaggccatgagggtatgtaacttccatgtgcaggttgcgatggaaccttagcctcgcctgtgcctgggaccaagggctgagggcagaaggcctggggagagctaaatctcagctgagagttccgaggacctgggtagggaggggactggagggcccagggcaggtgggaaggtgaggaggcctggtgctcatgctcttgggtggactctctttagggggcaggaacaaaggaccggaccctgattcgcatcatggtgtctcgcagcgagaccgacctcctggacatcagatcagagtataagcggatgtacggcaagtcgctgtaccacgacatctcggtacgggcctgctgcaggccaactgggctcccttttggcatctcagtcacctgtggaacctccctccttggagtggccatatgcttggcctctgtgctgtgtgtgggcatcttgattatggacctcggacttgttcatccccttgcccttaaacagattataaatttctgagggcaggtggatcatgaccttgctgtcgcccccaccttgcatcccccagcagcatcagagaacactcgggacctccccaaccttgaccgtgaccttcagcgttccgatcaccgtgtgattccttgatctgtcagtgagaactcatgtcccaaaggctctgtggagctctgctgtcactccctgacaaagcacttcctgcactcagctttatggcgtaggccacatagtaaggccgttcagagcgagggccctgggggtcacgccacttggagtccagcttttctacttgctaactgtgtgaccttgaatggctcccttaaatctccctgaaccccagctccattgtctttaagatgagaaaataatcgttccttcctgggaatgttgtgagtattgagtgaggcagtgcaggtcaagtgtctattaaacactagccacagttgtatcgctgtgtggcagagccagtctgacaaaatacattctcagctgtgtggtctaacgctcaaattctgaactcacatgagccttgcaattgcaccatggggaccacgtcctcccaccttagactcagtagcatttgatgatggtgggcatgtcatcacaggaaactcactgtgtttccttggctgtatgaatgaagctgttgttagagaattagtgattctaggctgggcacagtggctcacgcctgtaatcccagcactttgggaggctgaggcaggtggatcatttgaggtcaggagttcgagaccagcctggccaacaaggtaaaaccctgtctctactaaaaatacaaaattagctgggcttgcctgtaatcccagctaattaggtaggctgcggcaggagaattgcttgaacccgggagacagaggttgcagtgagctgggatcacgccattccacttcagtcttggtgacagagtgagacttcgtctcaaaaaaaaaaagagagttaataattcattacagagtatctcctgcatgccagcaagctatggacatctggaagaagccacatgccttgccctcaagttgcttagggtggaaggaaatgattagaaatgagccaagccgagcctgcactcttagagtaagtgtagtggcctcagacagaggagagatccctgggacctgggcagtctgagccttccactggacagtcatgtgtgaggagattgcatttcctgagcaggacactgtgttgcgttacattggtaaccccaatttaaggcagcataaatgcactgggaaaacagcaatattggttagccctgggaagtggtttttaggatgattataatttttttttgtgggtattcatttgatgtggatagctggggtgagtgctgctttccgtcttctgatgggggcctggagaaggctgaactgcattttttaaggtctgtgacgcctgctgcaggacctgcagtgggagaaaattccccagggtggggctttctccctataagggtgctcagggctgaatatcaggacccagaaggctgaaagtgactgtccctcccttaacggatgtcttccttgtttctgtggccagggagatacttcaggggattaccggaagattctgctgaagatctgtggtggcaatgactgaacagtgactggtggctcacttctgcccacctgccggcaacaccagtgccaggaaaaggccaaaagaatgtctgtttctaacaaatccacaaatagccccgagattcaccgtcctagagcttaggcctgtcttccacccctcctgacccgtatagtgtgccacaggacctgggtcggtctagaactctctcaggatgccttttctaccccatccctcacagcctcttgctgctaaaatagatgtttcatttttctgactcatgcaatcattcccctttgcctgtggctaagacttggcttcatttcgtcatgtaattgtatatttttatttggaggcatattttcttttcttacagtcattgccagacagaggcatacaagtctgtttgctgcatacacatttctggtgagggcgactgggtgggtgaagcaccgtgtcctcgctgaggagagaaagggaggcgtgcctgagaaggtagcctgtgcatctggtgagtgtgtcacgagctttgttactgccaaactcactcctttttagaaaaaacaaaaaaaaagggccagaaagtcattccttccatcttccttgcagaaaccacgagaacaaagccagttccctgtcagtgacagggcttcttgtaatttgtggtatgtgccttaaacctgaatgtctgtagccaaaacttgtttccacattaagagtcagccagctctggaatggtctggaaatgtcttcctggtaccaacttgttttcttctgcttgattctgccctgtggctcagaggtctggccttatcagccagtgaaagttcatgtaaccttacgtagagatttgtgtgcaggaaaccctgagcatacactagtttgcagggactcgtaaggacatgggaagggaggttcccgaaatccaggcaggaggcccagacacctgaaaggcaaagggatcttggttggttgcaggtgcagtgaagtccactgaaggtgtggtgcgaagaatgcagtccttcacccaggtcccaggagggaagaagggtgtgtgctaattcctggtgcccctcggcgggggccagagagaaggatggggacaacccagagagtcacaagaccagtgcctcccctcagggtgcctccaggctgaaaggggctcctggctctggtctctggggaccctgtgcccgttggttggtggtgtgagggaagagaatccataagagagtttctgagaattatggtgtcatgtccagaagctagagcttaccttgcatcaggggtctccacccactccttttccaacctcctgcgttgaggtttagaaaagagagaatcgactaggcactatggctcacgcctgtaatccaaggactttgggaagctgaggtgagaggatcacttgagctcaggagttcaagactagcctagccaacagcgagacccctgtctctactaaaaaatttggccaggcgtggtggctcacggctgtaatcccagcactttgggaggtgaggcgggcagatcacctgaggtcaggagttcgagacccagcctggccaacatggtgaaaccccatctctactaaaaatacaaaaattagccaggcatggtggcacattcctgtaatcccagctacacaggatgctgaggcaggagaatcacttgaacccaggaggcagaggttgtagtgagctgagatcacaccattgcacttcaacctgggtggacagagtgagactctgtctcaaaaaaaaaaaaaaatttacctggcattgtagtgcattccctatagtcggctactctggaggctgaggcaggaagatccttagagcccaagaaattgaggccgtagtaagctgtgattacaccactgcactccagcctggacaacagagcgagaccttgtctcaaatgagaaaaaaacaaaaagaaatgggagaatccagagagactaggctagatcaagcctgctgggtcctggcaggagccccagggagtagctcatctgcagacatttgcttgaggactaccccctaaacataaaggaagaatgacatccgaagggtgtggagcagccatgagctgagaactagcctggtctacctgagattgatggcaggtcctggtcaacacgtcagctctgcgtcagagtccatgcctcaagcccaagctgaagccccatccctgctgctctcccaagaactcctctgctagggcaggccccttgcccttgggtgccaggtgggacctgcctgatgggatggggtgcttggcatatacaacttgccatgaactcaaggtgaccctgggggcctcctgaattgtgatggggcctagaaccaatgtgctctgatgtgaccatattctgtgacattaccttgccctgtttactccaaagttcccagcctggtgcccagcaggcaatattgcacctacagacacatttactttggtttccaaagtgtttttagacatttgaatttgttgccaacatttaaacattgagagatttcatatttttaaaaatctggaattctggcttctcttgaaaactcagaaattctggcactatggggcttgcattcctgcatggctggagctgagttgcagctgcccctttaggcctgtactccttatttgctataggctccgtcttgtattacactaagcccatgtcacccatttggctcctgcaggcctttgggtttgagaccctggtctacacacttggagaccacctgttgtaaagtacatggatgtgctttggtcaaggaatagaccaaggtggatatccaggccagagtgactcagcgagtttaggtcacaggcgtatactccacttgttatataacctgcttgtgtaagttcatacttggctcaaagccactattgtttggaaaaggtataactgccctgctgacgctgtacagatgttcttgggctcggatgggcatggctccacgtggtgtgcactagcacccagagagagtgaagctattgacccctgtaagggagagtgaccatctggcagatagatagaggggagccaggacatggctcagcttgtgcccagagggagagttaagccgctgaccctgtagccagggagtgcacctgcaagcatgggggtggcaggagccacagagctggctgctgagaggagctgcagatctggagaagacagcctaggtaaaggtggacagtgtgagagctgctgatgagatagctgctgaataaaactacattttacctgcctatggcccgccaggttttctttcagctatcgcccatccacccagtcccctcgaacctcagcatgggctggaacctgaccctgggcatgacatttggcatagttgtggacctgacacctgtgtttgtcctagtcctgtttctccctgccttcctgttcctctcgctgccctcatggtcactcccaagagatccaacccatgttaagtatgggctggaggactgcatgaatgcctcatgatcttcccagaggcaaaggcacctactgccttccaaggtcagtgggaggttgggatcaacactgtttattatgcttaggacaaaaaagatagggagaaagatgtgcaaccttacaggtcatctttctgggatagaacacaatgggtcttctcctgcctcctggatatgttagtcaaggccagtccatgctacacatctagtctgacttctaaaatagaagcaccagatgaattcagccctgagagaattttcagcagctgtgggggcgctggaggaaacactattaaatagttttgcacctgagacagatagcctcactcgcctcaccctagtcctggtggcatttgtctcaggtgcaaaatttaagaaagaaaccttggagtgctcaccctgtggctgggtagatggtcctaaagtggtggttttcaagcctgagtgtgtatcaggatcatcaggggagcttgctaaagagcagttcctgcggtcagaccctcatgcattttgagcaggtgtggggactgggaaactgcatctgtaacctgctgtaatctaacgcttatctaaatactactgtgctcacacagagaacaccgcaaaagtagaggtgttcctccagagggcaggtgagcagatggcacagtctgcttggaattcagtcaggtgatgagagatgagatgaggcactcctagctttgggaagagggagctgaaagatgaacctttgcaggtgcccacggtcaaagtggtggtttaatgccatgccatgcccattttctgttggccttggcagggagttacagccctaccttaggacctggctccttatttctgctgtaggctctttcctgccctggccgagatggagtggaatgagacctagaaacatcaagctaaatacatgtcctcagaaagataaaggtttacattttcacccccatcaaatctgaaagctctctgcctgtgtttttctaagggatagggacatcattactcagtccacaacctggactcatgtagggtcccctgtcagtaaaggagtcagtcaagcccaccaggtataccaaggactcttaccctcagcccctactccttggaaagctgccccttggcctaatattggtgtttagcttgagcctgactccttctcaacactaagagctgatgaagtcctgaagcagaaagagctctgacctgagagtcaaacatccttattctgatctcagctcagcccctgatttgttgtgtgaccctggatatgtcacttcctgtctttttgactttttaaaatgaagggtagactagaggagagcttctaaaactttaatgtggtcaacgaaatggaataggaaattccacaagtctgtccttccacaaaagcagcaaataaggtggcaaaaactcaaatttatgggaactctggaaacgaattgaaagtttacagcaatcaggtgaatacctaagaataaaagctggatttagtaagagagctttgttgtgttttagcttaccctggccccatcccccactccccagcatggcagcagcatcaaaaacaatatccctcattccctgtataggttcctgtcactggaggtagcagatta

SEQ ID NO: 1531 - DNA, 423 bp, Homo sapiens
gctgagcagcctctgagcagcaagagaggaggaggcaggaaatttagggaaggttcttcctggagggtctggagccctggagatgaagagccgatccgaagctgccatgtagaagaaagcatctaacaggccagaggccccatgatgatgtcgaatgcccatcgggcacccagctgagccctgcaggtgttaactcagtcttcgtcacagcagtctaggcatacactcaccattagcccatttgtaagctgaggaaacaagcctaaggagggtgaaagccttgccccagggcacataccggtcctgctggtttcagagcgggcttttcacctctgtttcttcctgtcctcttgtggactggtatctgtgtttaccatgacccagccccatgtccctccagcctcttatcctgcttctccctgc

SEQ ID NO: 1532 - DNA, 974 bp, Homo sapiens
taatttggagctctcctaaagtgaagatggcagcctggaaagacgtttcaaggtcagtgtattagtggctcatgcctaggggaaggaataacatttggagcaaacaggagacaaattgaaaagcttcaggaggaaaggctaggaaataagattctttgggtgagaataaggactttaaagagattccacatattcctgggaatctgaaagaccatacacatgcctagggctgggcatgtgcttaaaaagacttgagagggccctatgctgtcacctctgcctgaccttcaggctccgtgcaagcaggaagtgaaggctaaggcatagttataaactgcatgggtgaaggttgaaaggtgtgtcccaacacagaacacatctgcaaatgctacgaggcattttgttgttccaagtgttcaaagaaatcttttgaatcactagctgaccactaagctaaccaaagacttagtggccacacctgacaaagaatacaaactaaaaaactaaaaatgtagttcaagaaaataacaggctgggcacagtggctcacatcggtaatcccagcactttgggaggctgaggcaggtggatcacttgaacccaggactttgagaccagcctgggcaacatggcaaaaccccatctctgcaaaaaatactaaaaatttgcagggcctggtggcacacacttatagtcccagctgcccaggaggctgaggtgggaggatcacctgaccctgggaggtccaggctgtagtgagccataatcctgccattgcactccagcctaggtgacacagtggaggaataattttatttccaaacttgccacattataaataatattcagaatgttcagttttcaacaaaaactatgaggtatgcgaagaaacaaagtatggctcatacatagaaaaaaaatctgttaatagaaactgaggaaagctcagacattggacttaacagacaagactt

SEQ ID NO: 1533 - DNA, 974 bp, Homo sapiens; identical to SEQ ID NO: 1532

SEQ ID NO: 1534 - DNA, 423 bp, Homo sapiens; identical to SEQ ID NO: 1531

SEQ ID NO: 1535 - DNA, 2234 bp, Homo sapiens
caaccaatcacaaagtgtgggcattatttaaatcttgattcaaataaacaaactgaaatatataaatgacacttatgaaacaaaaatgtggccactgattgggtatttgactaaatcactgctcaattttattttgtgcgtgataatagcaatgtgcttatgtgttttatcttctagtgatacatactgaaatatttacagatgaaataatataatgccaattattttcttgaaattaatgtggatgtggaaagtagacagagatagagatttaacaagatggattatgagctgataattgttgaagttgagtgacaggcacataggggtttattataatatcccgtcttcttttgcatatgtttaattttccataataattttttaatgttctaaaaatttaaactttattttccaatcaaatggaagtctttagagattttattttgcaagtggcaatatgattaaaagggaaataggaaagataaattaagcaatgatttgcacattaattggcagttggggaagaccaaagaccaggagattagttaagagtctcttacagcatcccgatctacattggaaaaagtctgactgaggtaacattaatagaaatgaaaaggaaaaagtgacaggaatgattttgaggagcatcaaagttcgctgctacttgaatatgaaacactaagcagagaaagattaaaagaggacacaaaaatctcaaacctggcatattttaaaaatagtaatgtcatgaataaatataggccagtcaagatgacaaattgttgggtgatgaggtaacaaatttacttctagacatcaagtttgagaggatgaagtgaccacttgctattaaagtaaattattgtttacctacacatgcattaaaaaaaatcctttgtgctgtctcctgaaatgtgattatgtgtttaaaaatacagtgtcataaattaaacttagcataataaaataattgaataaaataaaactataagtcaaatttccttgttactgatattaaaatagcccaaacccttctttgataaaattctacttttttgtcatgttttaccatttgtttacattatttccctgcaaaaaatgttccttgatatcataagtagatctgtatatgtacttattttatatcactttccctgtctctatacatctaaacatataaagcaatgaacacatcataggtgcccaataaataccaagttttctggccaatatgctcacttattgcaagcagtactgagaagaataagattgtaacgctgccagataatttggaaagtcttctgaagcttccttaagtaagataacatcattattttattaagtagtatcattaattatcttaagtaacatcatcaatactgaaataatttcttctagtgacaaactatggaaatacatatagtagaaactgtgtctaagtcagacttttgaatttcatttatgacaaacttagttgtacactattaaaagtctataataaccacaatactgttcagtgcttagcatgtccatacccaaaagtttggaatttgtcatttttaatccctagcatcatacattcccatatcctttaccttagtaagtgattccttgtgaccaagtgaaccactctaattacctccataaaaagaaattgagaagatgtctcaaaaacaataaaaagcagaaatacattgttctcaaaaccctctgattcttgacagtttttgcttcctagatccaccagttcagcatgctacccaatactgacaactaatcccagactttctttgctacttgaagccaaggcaacatccaactacatcatctctcgctgtttgcttgaaaacaaatgtgaaactatttcattcgtttgcttgaacttaccaataaatacatggctagaggtcatttagtttggcagtattctgattcagcaaagcaataaaaccaacccaaactatttgaaatcccaatgtccaggaccctggagcaccatgtctcttgctgtcatagcacctgactgtgagtgtgtttcctcactcgcctctgaaagctggcggcaagacccttgaccatcaaacaggagaaaaatcctcatcatctatcaagggggccatagttggaatctttctctgttatgcacatagaatgttcctgcagaaacaaagatctttccatgaacagtaataagttccctcttgtttcaacaatgattggttggaatt

SEQ ID NO: 1536 - DNA, 3334 bp, Homo sapiens
agaagatgagacttttgaatgaatgaaaaagggtatcttgatacccagaattccccccaaagtacgggtaattcaacctgcacagttttctttcactcaaagtgttcagcacttgtgagtgaaaaatcatgtaattatctgtaaatatgtagctaacaaattgacctagtttctgtatttttttgtttttgtactaaagtttataggtctgtgccagctagagagaagttgctgtcattaccagttgtggtcctagcatctaaccctgaaaccatcctaggtgacatttttagaattaatacttaaatgttaaacagggggaaatgaagcttaatcatggtcaggtttgagatcttttgcagtgaaataattttatttaatataaatgatcacatgtcctcaatcatgaatgaggtagggagcctctctcccccagtggccatgtttacaaaagtgtgttttgtctataaagtgcaagtgttttaatgtttatgtaaattatgcaggtgataacatggtttggaactgtttattgggctctttaactgaattttcaaatgaaatgaactatgcttattgctggcacattgatcccatttctggaacatttttcctatttccagagttacatatgttcttttgtcattacccaatttaacctccctttctctgatatgccttgtagccaaagtattaaaggctgatgaacatagacaagggaaatgcatttcttagaaatccgtgaaccctcagttgtatgctttcagtactcgtgttaatatgtttctatggcaactctgaggtcagtggtttagaaatgagataccagtgttaatgaaaagtgtgtgctctttgcttttgcatggcttggcttagtatccaaggtatattagggccacttgaaagcatgaagaccagttatatagggaacaggtttctctcagtggcacattttgctttttctgagccccaaatacattgcctgggcatgaacattgttaccgtaaattgcacatggtcatggactgaattatgtgactttaaaggatgtaactgcccaacatttgcagattctgggtggtctatgtgaccatttgtctcgtatccaaaaaccccggggctattggaacccttccaacactttttcctttgtcatagacaagtttatatataacttaccaagatgttggctgtcctggtgtattgccagacagctctcttttggttcccattccaaatgtgctgctgtccttctttgcatttcacaatatcaaagaaaccaccacccttcttcctaacagcattttatgccttttattccacattaaatgggaattgtgcctacttaggagtgcccctccaattaattacatgtgtccaagaataatccaagctagagacacaaggtgggaaaacatttcaaaaaaaaaaagtcctcttaaggccagtaatttatctgaaaaggtattttatcacaccttgacaccttatatatgagcctattaggagctgcaggtggtttcatagggtaaaatccaagaaaagagaaggatgtgtggggtttctattagaagataattttgttctcattttaccttttcttttatgatccttctctgctagaacaggttaattctccaaatttgttttgttttgttttgttattttttagggaactcttttgcaaaagcaatggtcggatgtaaataacatttaaagtatagtgcacataacttccccggactgttccaatctgataatttgtaaatgctttagagtttttttaattaacacttgtgttgctaaattctatttatgtaagtctgctaaagttttttagcccacttaaaacttaagacaaccatttaaaataatggatgggttactatgagcaatttcgctttcagaacccccttgttttagtatatgaaaaagcctaatgcgcattaatgaggttgaagagactatgagaaatatgtatagtgtatattttaaaacagctttgcttgtattgtgaagatttaaaaacaaacttgagatttttaacgtaactattaacacagttttaacataagttatcccactgggtttaagagcatcttgaatgtataatcctttttgtaacccaggttggtttctacttttaccagtcacccaaacatatttatgtttttagttttatgtactcatttccctttgttttcctcaaacagcatgatttttttgcacatgtagaaattttttaaaagaaagaaattagtacatcattttctctggattttcttcacttccctcttcctttctactaactccttccttaaaggccatatcactccatttgcattatttgtgcaaatgccagggttggtttttatttttatttttgctatttacctaaaaaaagaaaatgcttcagtcaattgcttttttatttaaaaaaaaaaagaaaaaaagctgtaaccttatcatttctgagtagaccattgagcgatgaatgcacacctgtagtagcccaggaccagctgtggtggctaaagggaatatgttaattaagcaagaggttcttttctaaaagtggtatctgttatccacaatgtattttagttattcccacaagtcaggggtccagataaaatgagggttatcagctaactgatatgctatcattgaggttcatcaatgaatttgtacatttctagttccctttggtgaagggaaaaatgatgattttgcaagacctagattttggcttggtttcttgcctccttttttggcagccttcatcttctcatctcccaaaccccctgagcccgtagggttttcatagtggacaaagaacttgtggtcttttaaaactgggactgatacttttttgagagagtatcgtgtcgaaagtgtgatgttctaccactttaccaataactaattttaaatacacattgtcctctcgatttttggaccaaacagacgctcacagtggaggcttatcaagggttgcattggggaagaagcctctccctctctgtcagcaccagctggtaaaggtgactgtacagatgtgcattttccttttggtataaatggtccacagcactaactggtaaggcttattgtacagtatattgtcagtattcttctggttcagcataccttatagttcatatataacctgtattaattgtatagattgtgcattaaaagctgttaccaagttgtcagaacataagagcgaaaacaaggtcatatgtaatattttgtttgtaagtatcctttgtatcatagcaaaggaaatgtttaaaaaaatcaactgtaataaagtaattttagtacacag

SEQ ID NO: 1537 - DNA, 6081 bp, Homo sapiens
agtgttggtgttcactcactatatgtctttaagaaaattaaaactatggaaaatttgtctagcatatcagaagttgtaaatgctatatctggtatccagaggctggctgtaaaaagttccttggggtcactctatctcacattttttttggttagcattttaaaaatgcaaagccacatactttgaaatatattattccaaattgagctcccttccctttgcacatattttttcctccccttattgaagtcagctctaaccccaaattctagtatccaaaagtatttttatttgtataatgctatctgaaaaatgtgtttatattatattttcagagctgcaattcttattcgccatttcaatacctagagatagagagtcttgtatttgaagccacacacactggtgtaatatgcttagtactctaggtcaaggatttgttggtaaatggaacattttagcatagtcatgatttttggttgcctagacatcaggtaaacattcagtacactaaagaaactatcctggacactccctcctgcttccaccaatttttttctcacccccttttcaaaaattgaaaactctatgagtgtctttttgagaccataaagcagactttagtaactttctatttctgtaagtactaaatgtctggcattttaaacttttgtagaatacattatgttggacactggaataatactatttattttcacctgtgaaaaatgacttcattgtacttgaaacacctcctttgcatttctccatttgtgccattcactagtggaaataaattgtattataccatgatctactggctttttaaaactgtattaaatatgcacatttttggtatagctattatcatttgtatgtatatattgtatatacatatgagtgtctgtatgtgtgtatagatggatggatgtaactcatactgtacatttccatcagggcacttaaaagttctgttatttttgtttggttttgttatttcagtcctcagttaaggcaagaatgcatgtgtttcttaagaatgagtactctgcgttgatgtttatgagaaggtggtcattagatgcagtcttttcctttttaatcccctcttagcacttctgtgagtggagaggacattaagtaaaatttggaatcataagttgcaatgcagtaaaatggtgctggggaaggagccagttagtgtttctgtgagtttgtgttgtgatgcaataagagataagtaatgcagagagaaatgaaccatggaaagtaagaacactgatggtgattcctctgcaaagatgataagaaaaagaaccaataaatcacacaatctttatgtgctttctatatgtatttcttagtagtgataccattgatcctcttactttttttactccattaatactaataattatatactttgctgaggatcaaaacagccaagaaaggaattactgctaaagcatctaagattctcctgaactgtaaaatcaacaggaaatggccactgggagagaaggatttggtattgggtgaggggctttctccctttacctgcctcttcttgcttgctaatagtaagttctttgtgcaccttccaccacttctgagccactactattcaagtagagatttgccccaacacattaactttttccttggagatttatatggtcctgcattttgtcctgtgctcacaatgtgaagtgtcttctgtattcaaatcaaaaaataatatatttaaggtatataagtgtgaatctcctataatgatggaagaagaggttctcttgtcttagatagaaaagagccttctccaagagcaatgtcaaaacttgggctgtcatctttgagctgtttaccaaaatacagaccattattgaagaaaaacaaattatctattttgttttcccccatctaacatgatagtgcccccaaccaggttgtagcattgccttttaaaagagactcactcactcttagtttttaagaactggaaatttcccatcctcagatcccttaaaggatgaagagttggctgtacacttagcggacttgcctcttgtatgcaaggactactgattgaagtctgttttgctgtgtctggttatgttgtctgcacttttatgaaatcactacaataggtctgcattggaaatgactattaatttgtaaagaagtaagttttattaaacactgtctagaaaaagaaagtgaagctgagaactcttcctttattgtgcatttatattttctgctgaattccggtagttccctttaaagtcatgttgactaatgttttcctccttgtttgtattcagatttccaaaatttcactcatacaagggaagagactccatttagcttaacggtagtctttagatcataagaaatatataaattagtatgcaccttatctgcctgttgtgggtttcttaaacttgcacttcctacccacccaaagatagatatcctttaaagaaaataaaggcagagaattaaaactggggagccatttactatgtcaccatcactgttaactgtttcccagcaatctaaactttttgaagtttcagaggtgtattttttttttgtatatatgtctgtgtgattgtattgttttgtttctaaatatacaaggaattctttaaatagagaaaaaggttaatcctcactgaaacaccaggatgcccactggatatactaatctgaacatctgtaggtagtttgtcatgaaaaagtggagagaagatgagacttttgaatgaatgaaaaagggtatcttgatacccagaattccccccaaagtacgggtaattcaacctgcacagttttctttcactcaaagtgttcagcacttgtgagtgaaaaatcatgtaattatctgtaaatatgtagctaacaaattgacctagtttctgtatttttttgtttttgtactaaagtttataggtctgtgccagctagagagaagttgctgtcattaccagttgtggtcctagcatctaaccctgaaaccatcctaggtgacatttttagaattaatacttaaatgttaaacagggggaaatgaagcttaatcatggtcaggtttgagatcttttgcagtgaaataattttatttaatataaatgatcacatgtcctcaatcatgaatgaggtagggagcctctctcccccagtggccatgtttacaaaagtgtgttttgtctataaagtgcaagtgttttaatgtttatgtaaattatgcaggtgataacatggtttggaactgtttattgggctctttaactgaattttcaaatgaaatgaactatgcttattgctggcacattgatcccatttctggaacattttcctatttccagagttacatatggtcttttggcattacccaagtgagcctccctttctctgatatgccttgtagccaaagtattaaaggctgatgaacatagacaagggaaatgcatttcttagaaatccgtgaacctcagttgtatgctttcagtactcgtgttaatatgtttctatggcaactctgaggtcagtggtttagaaatgagataccagtgttaatgaaaagtgtgtgctctttgcttttgcatggcttggcttagtatccaaggtatattagggccacttgaaagcatgaagaccagttatatagggaacaggtttctctcagtggcacattttgctttttctgagccccaaatacattgcctgggcatgaacattgttaccgtaaattgcacatggtcatggactgaattatgtgactttaaaggatgtaactgcccaacatttgcagattctgggtggtctatgtgaccatttgtctcgtatccaaaaaccccggggctattggaacccttccaacactttttcctttgtcatagacaagtttatatataacttaccaagatgttggctgtcctggtgtattgccagacagctctcttttggttcccattccaaatgtgctgctgtccttctttgcatttcacaatatcaaagaaaccaccacccttcttcctaacagcattttatgccttttattccacattaaatgggaattgtgcctacttaggagtgcccctccaattaattacatgtgtccaagaataatccaagctagagacacaaggtgggaaaacatttcaaaaaaaaaaagtcctcttaaggccagtaatttatctgaaaaggtattttatcacaccttgacaccttatatatgagcctattaggagctgcaggtggtttcatagggtaaaatccaagaaaagagaaggatgtgtggggtttctattagaagataattttgttctcattttaccttttcttttatgatccttctctgctagaacaggttaattctccaaatttgttttgttttgttttgttattttttagggaactcttttgcaaaagcaatggtcggatgtaaataacatttaaagtatagtgcacataacttccccggactgttccaatctgataatttgtaaatgctttagagtttttttaattaacacttgtgttgctaaattctatttatgtaagtctgctaaagttttttagcccacttaaaacttaagacaaccatttaaaataatggatgggttactatgagcaatttcgctttcagaacccccttgttttagtatatgaaaaagcctaatgcgcattaatgaggttgaagagactatgagaaatatgtatagtgtatattttaaaacagctttgcttgtattgtgaagatttaaaaacaaacttgagatttttaacgtaactattaacacagttttaacataagttatcccactgggtttaagagcatcttgaatgtataatcctttttgtaacccaggttggtttctacttttaccagtcacccaaacatatttatgtttttagttttatgtactcatttccctttgttttcctcaaacagcatgatttttttgcacatgtagaaattttttaaaagaaagaaattagtacatcattttctctggattttcttcacttccctcttcctttctactaactccttccttaaaggccatatcactccatttgcattatttgtgcaaatgccagggttggtttttatttttatttttgctatttacctaaaaaaagaaaatgcttcagtcaattgcttttttatttaaaaaaaaaaagaaaaaaagctgtaaccttatcatttctgagtagaccattgagcgatgaatgcacacctgtagtagcccaggaccagctgtggtggctaaagggaatatgttaattaagcaagaggttcttttctaaaagtggtatctgttatccacaatgtattttagttattcccacaagtcaggggtccagataaaatgagggttatcagctaactgatatgctatcattgaggttcatcaatgaatttgtacatttctagttccctttggtgaagggaaaaatgatgattttgcaagacctagattttggcttggtttcttgcctccttttttggcagccttcatcttctcatctcccaaaccccctgagcccgtagggttttcatagtggacaaagaacttgtggtcttttaaaactgggactgatacttttttgagagagtatcgtgtcgaaagtgtgatgttctaccactttaccaataactaattttaaatacacattgtcctctcgatttttggaccaaacagacgctcacagtggaggcttatcaagggttgcattggggaagaagcctctccctctctgtcagcaccagctggtaaaggtgactgtacagatgtgcattttccttttggtataaatggtccacagcactaactggtaaggcttattgtacagtatattgtcagtattcttctggttcagcataccttatagttcatatataacctgtattaattgtatagattgtgcattaaaagctgttaccaagttgtcagaacataagagcgaaaacaaggtcatatgtaatattttgtttgtaagtatcctttgtatcatagcaaaggaaatgtttaaaaaaatcaactgtaataaagtaattttagtacacag

SEQ ID NO: 1538 - DNA, 305 bp, Homo sapiens
ccagtttttttaagcaattttattcccatgaagataaactctattgagtgactattggataattactgaaccttaggcagtgtgctgaatgttggggttacaaaaatgggattaccactcagatggtaagagtgtaccatctgataaaagacataaaccctcgtccgggtgcggtggctcgcacctgtaatcccagcactttgggaggccaagtttggtggatcacctgaggtcaggagttcgagaccaacatggcgaaaccctgtctctactaaaaatgcaaaaattagctgggtgtggtggcg

SEQ ID NO: 1539 - DNA, 740 bp, Homo sapiens
tataaattgtgttggaggtgggtaggaagctgtgagtatgacttgaagaaaaatatccttttcagtgacaaatcagagtttcttacaagttattgtcctgctcccttccaagttgtcttgaagaatccttgctgctaactctggatcctgcttttcctatagtcagagggctccaaggtagaactctctaagtccctctcaatggcactctttgcctagaccaaactaatgaccaaacagtaatcaatctatcactgttgaagtcctggttttctcaaccaaattttaagtctttcccaggtatgtcagtcgagttgccatgaatcctcacctgtaggagtttctgggattcattttaaggaaactggaagaaaattaatgttttaatgtaaatgtttttaaaaccaagatcaccatagagttcacacaaaattttaggcagtgtttcaagaagcactcttatgtgttgttctttcagcccatgctccaggtcaccggtttttaggtaaacatgacatgacatgtacttgtaatatcagtgaaaggggcttttagtcgtctcagtatcttttttgcattcaggtattatagcgtttccaacaaattgagaaattacttatttggtgtaaaatgacgagagagctttagaatttaataaaatgtcaaaaatacaatttgatacccttaaaaattattcatagatctggctgctctgtactactggatgggtggaataggga

SEQ ID NO: 1540 - DNA, 305 bp, Homo sapiens; identical to SEQ ID NO: 1538

SEQ ID NO: 1541 - DNA, 7873 bp, Homo sapiens
tcccggtcgagatgttggtgattggggacgacagcgccttcactgtcctgaagaagccacgccggcgggtgctgtgcggcaccgtgcttatacacaaggtgggcttccaccggggaccgtggagactggccagccctttccagccttcccttgcctggcagcacccagtaactggacctttccagcccttccccaagaagctagttctttttctccagtgttccctgatctcagaaggccccgccatcccctcagctacctaagcccagatacaggcattttcccagactcgtccccttttcttctccacacccaatcagttgcccggtcctggtgcttctcctcccaaatgtacaacacacatccttctcagaccccgccctcctgctttgccttggttcaggggtcatctactcatgcctgatggctgcagccacctcctcactgggctcccctgcctgcttcctgccttctggccttgctcatccattctccacactactgccagaggtgtctttttaaaatgtgtatctgactaggttattcatccactgaaagccttcttgggtgcctacaatcaatacaagccctcaccatagctccctgactccccaccttcatctcccatcatccctgccttcctcttttttttattttcttttatttattttttatttatttctttattttttgaggcagagtctcactctgttgcccaggctggaatgcagtggcgcgatcttggctcactgcagtctccgctgcccaggtttaagtgattctccttcctcagcctcccgagtagctgggattacaaggcgcctgccaccacgcccggctaatttttgtatttttagtagagatgtggtttcaccatgttggccaggctggcctcgaactcctgacctcaagtgatctgcccgcctcggcctcccaaagtgctgggatgacgagcgtgagccaccgcgcccagccatccctgccttcctcttatggtctattcacgccagctcctgtacctgccaggctatggatcatctctggctttgcttatgcagtatctgtggcctggaaaattctttccttgtccagcctccttttggcctggctaactcctaccattctacagaggcccagctctgatgtctccccacctggaaggctctccctgatctccatctccccactaccctgagctggttggcagccagtcctagtgtggactccatcactgtaattaccacctcacataaattttcaatttatgggtatctgcttccctagcctctccccaggctgtgagttcttgaaggtggagactgtgacttagtcgccttttttccttttcagcatatactagatgcttggtaaaaattgggtggatggatggatggatagatgggtaaagtgacccaaaatagcaaggctatgggagagagaactctggaactctagagttgggaaactggccacccactggctgtgtgacattggacaagtcaccgcccctctctgggtccatttccccatttgtaaagtctcttctgactccaacagactggaattcttgaagattcctggcaggtacactgtgaatgaggggagtttgctcttctgccctaaatgtgatgggccaggttgagtgtgaaaatcctgaggttcccccttcccaacaagaaattcatcccctgcctgtcttctaccccacatggtacagtgataccctcccccctggggcttttacctctttgtggctgcaggtggcaggtgctctggctgaggctggtgtggggctggaggagatcgcaaagcaggtgaacgtggtcaccaaggccatgggtgagtgctggcctgggagctggggaagagagtggggaaggttggacagccctggggcgaggagcaggttcctgttggctgcctagcggtgctccccaggttattccccaggggtctagggagtgtatccctgggggagctcctggggactggtggccttgggtaccatggctgaggtggagagtctggcagcctttctcagagaagagggtacctgtgggcagggcctctgagatgctgctgccacccttcctgatgcccagtgctaagagtggaacagtcatcccttcatgccttgtttctcataggtaccctgggggtgagcttatcctcctgcagcgtccctggttccaaacccaccttcgagctctcagccgacgaggtggagctgggcctgggtaagcttgtggccatccatcccagccctgcctgctccttggccctggactttgcccaccttgcatacccttagagccatcaacctggtcctctccccaggtggtcttagtatttttacctggtcatttgaggcccagcctgggccaacctgcctgatttctacctgctttgctgtctatacccacagctttggccatgtggagctctgtgcactgcccacctcctagcctttgcctgccattcccaggtcctcctgtccctgccagaatacacccttctttcaacggctattcaaagatcacctggctgcaaagctttctttcctcgcctgtgcttcctccttaactatctctagttaaagctatctccaccaccaggccacaagctcccagagaacagagatcgtgtttttcattattctgtccatttccatcccccactcccgcccacttactgtgtgagtccagcactgtgtgagtccttgataaaaacgatgagcaaatccccaggccttgagtgggtcagcagtgaccacatctatccgcagggatccacggggaagctggtgtgcgccggataaaggtaggtggtccctctggcacaggccgccctaaggccaaggccccccagatgcagctcattcctggctccctctgacagatggcaaccgccgatgagattgtgaaactcatgctcgaccacatgacaaacaccaccaacgcgtcccatgtgcctgtgcagcccggtgggtagcctctcgcccgcgtctcccaacccctcctacacctctggggaggagacgcccagagggtctcacctggggtgtcatgtctacccgcaggctcctcagttgtgatgatggtcaacaacctgggtggcctgtcattcctggaactgggcatcatagccgacgctaccgtccgctccctgggtgagccatgcactgggaaggggatcctacagccctttggaaagggctgagggagggtcttgtgatggcagagaacacggactgtgcgtcagataagcctgagttaaatcgtctctctgccacctaattgccggataccttgagcctctgtttgttttcttgtctgcaaattgggggtaataataatggtacctgctttataccgttgttttgaggattaagtgagattaaacatatgtaagacactcaacacagcgcccagcacctggcacgaactgagtaaatgagacctgtaattactcatcttccccgacgtaggggacacctccagggaacgtggtcatttgtggggttattgagggatgcctgccaggaggaaatcaggacatctccctcccgacctcagagccccagcttccaaggtccttgcttttctgttgttttctttccctgatgcccatttttcccttttggactgccacactctggtattgcagagggccgcggggtgaagattgcccgtgccctggtgggcaccttcatgtcagcactggagatgcctggcatttctctcaccctcctgctggtggatgagcctctcctgaaactgataggtgagacttggaacctggggtcacccaagccagggctccttgtaactggaaggagccagggagacttggagaccccgtcagggctgaccgtgacaatcagggctctggagcctgtgaagaaggctcttcctgggcttctccagccttctccagctctcactggactagaaggagttggtattaggatcctcctcagagaggcctgaccctttcccagggaccctctctccatacccctgtatacagtaggcactcagtccatgcttgtcgaggtggactcccttcctccagggctgctgagaaagccaggccaccagggtcaggatgggagggtccaagccctgctgaatccctggctggacagccgtgtctaagagagttatcttgctgcccttagatgctgaaaccactgcagcagcctggcctaacgtggctgcagtctccattactgggcggaagcggagccgggtagcccctgccgagccccaggaggcccctgattccactgctgcaggaggtaccaacccctgcctttggggaagggacaggcttcccaaaggatgcaggagtatacggtggggcgggtaggggccctggcacccacacctcccaccatagtcaagtgtggttgtgagaagggcctggtgggcctgttcttcagcatcctccctttctaggctcagcctcgaagcggatggcgctggtgctggaacgggtgtgcagcactctcctgggcctggaggaacacctgaatgccctggaccgggctgctggtgacggcgactgtggcaccacccacagccgtgcggccagaggttggtgccagggactttgccaagtgaggtcattcacaaaaccttagccccccttccacttgtttccctgaaggcagggaccttcctttttttttttttttttttaagaaggaatctcactctgtcgctaggctggagtatgcaatggtgtgatctcggctcactgcagtctccgccccccgggttcaagtgattttcctgcctcagcctcctgactagctgagataacaggcatgcgccaccacgcctggctaattgttgtgtttttagtggagacggggtctcgccatgttggccaggctggtctctaactccccacctcaagccatccgctcgccttggcctcccaaagtgctgagattacaggcatgagccaccacacccggccgacagggaccttcttaacaccacaaatgtatgaggttgttatcttagaattaaatgaaatccttcacagtgaataacttacaactcaaggcgaacttattctgttgtccttatttttctcagtttacccagaccagtgaaaagctcttaactgtccagcatcattcattcgagaaaaaggtatttggtgcctgccgtggggcaggcactgctctcagctgtggatacagtagtgaacagagcagacagaaatcactgccctcatggcttatgttctaggtggaagacagtcaaccagataaatcagtaaaacacagaggatgttagcacaaagggctaaggagaaaaaaaccaagccagggagcagagtacagagcgtcaagtggagggcttcggggcaggcctcacctccccaggcccctttcggttacgcagcccagcccctctccagactgcacactggatgtggaaagggatcttgggaagccttcattccacttccctgtcggccttttccagccttcattggtgctggctggaagtctggcagatggagggaggatctctgaattcctccccatctctctctgcctgcagcaatccaggagtggctgaaggagggcccaccccctgccagccctgcccagctgctctccaagttgtctgttctgctcctggagaagatgggaggctcatctggggcggtgggtgcctgggggctgaagggctgacagggaggtggctgggctggctggggtccaggccagcaccacatgctcagcgttgtcatcttccccagctctatggcctgttcctgactgcggctgcacagcccctgaaggccaagaccagcctcccagcctggtctgctgccatggatgccggcctggaagccatgcagaagtgagccagagccctgtgcatcagaccaggggtgggctgggggaggtgtttggtgacatctgcgccctgccaggccctagcccaaccctcagagtgattcccttggttccctatagtgagcctctttcactctctttccctgccaggtatggcaaggctgctccaggggacaggactatggtttgtactcaggctgtggcctcagacctttctccttttggccctgtaagtctaaagagcaccctcggttgcagggcccgtgctcagccccctttccttcaccttgtccagctggattctctgtgggcagcggggcaggagctccaagcctggaagagcccaggagctgatctgttacaagtcctgaccaaagcagtcaaggtgagtgaggctgggcccagccacctggggagacaggcttctagccagcagactcctgtctccatgtgaccctgagcaagttaataaccttcctggaccgcagtttccttctctgtacaatggagatgagcacctatctcagaaggtggttatgtggctaaggaaatatatagagccccgcacactgcctgggatgtgacagggcctcagtgaatggtgacccttttccctgctggaagtagatgagaagtgactttccatttggtgacagagcagagggtgctggcagagccagggcaagggcgtgcagggccaggctgcacggcagagacgttctgcccatggcaggaaggaggcggcctggtgatctgcccttgaacctgctcccacaccccatcccccagagtgccgaagctgcagccgaggccaccaagaatatggaagctggagccggaagagccagttatatcagctcagcacggctggagcagccagaccccggggcggtggcagctgctgccatcctccgggccatcttggaggtcttgcagagctagggtgtgtgactgcctcccttggcctcagctcctctcactgctgtgctgaggtggcctttgtcacttccttctgccttccaaccctcaccttcccccggcctggccccattggcccaccctctaagttgagcaggaaatcctccaccaagcttccagaactacagacagcacccagagtgagctggagtgggtccccatgcctctccagcatgccctttccctttgcaggagggtggagtccctgggtcatgccctcccctgccagctctgggcttcagagataaggcattttccttgtgcagcctttacctggcaatcctaatttggttttaagactccctgtgaaatgctttccgcaccttaaccccagtgagcgtgaaaaagaaagttaataaactataatacatggaagcaagaaagacactgcctcctctgagggaccttttcccaagcatgtaaacaagggggcccacagccctggctgcaggcatcatgacccatcttctaccaggcagatctttattacctgaacccctaaggcagtgtctcctcacctgggctgcttccacctcagcccccgacccatcccctttccagtacacacacctgatgcatgtgagaatggtagaggggcttttctcagcattgaattaataattcagtggctcctcgggagtcgaatgggcatttgggacaccagaaggaaaagaaatcatcatagtctaaggttcagttgtagatcaaaaaatgcagccaggccgggcacggtggctcacacctgcaatcccagcactttgggaggccaaggcaggcggatcccttacactcaggagttcaagaccagtctgggcaacatggtaaaaccctgtctctaccaaaaaatacaaaattagccaggcatagtagtgtgtgcctatagtcctaacttgggaggctgagttgggaggatggcttgggcccaggaggtcgaggctgcggtgagccataagcatgccactatactccagcctgggcaacaaagcgagaccctgtctcaaaaaaaaaaaa

SEQ ID NO: 1542 - DNA, 8091 bp, Homo sapiens
ggcctggcccgggagcaggcccgggctgaaggcatcccggtggagatggtggtgattggggacgacagcgccttcactgtcctgaagaaggcaggccggcgggggctgtgcggcacggtgcttatacacaaggtgggcttccaccggggacgtggagactggccagccctttccagccttcccttgcctggcagcacccagtaactggacctttccagcccttccccaagaagctagttctttttctccagtgttccctgatctcagaaggccccgccatcccctcagctacctaagcccagatacaggcattttcccagactcgtccccttttcttctccacacccaatcagttgcccggtcctggtgcttctcctcccaaatgtacaacacacatccttctcagaccccgccctcctgctttgccttggttcaggggtcatctactcatgcctgatggctgcagccacctcctcactgggctcccctgcctgcttcctgccttctggccttgctcatccattctccacactactgccagaggtgtctttttaaaatgtgtatctgactaggttattcatccactgaaagccttcttgggtgcctacaatcaatacaagccctcaccatagctccctgactccccaccttcatctcccatcatccctgccttcctcttttttttattttcttttatttattttttatttatttatttattttttgaggcagagtctcactctgttgcccaggctggaatgcagtggcgcgatcttggctcactgcagtctccgctgcccaggtttaagtgattctccttcctcagcctcccgagtagctgggattacaaggcgcctgccaccacgcccggctaatttttgtatttttagtagagatgtggtttcaccatgttggccaggctggcctcgaactcctgacctcaagtgatctgcccgcctcggcctcccaaagtgctgggatgacgagcgtgagcccccgcgcccagccatccctgccttcctctttttttttttttttttttttttttttttttttttttttgagacggagtctcgctctgtcgcccaggccggactgcggactgcagtggcgcaatctcggctcactgcaagctccgcttcccgggttcacgccattctcctgcctcagcctcccgagtagctgggactacaggcgcccgccaccgcgcccggctaattttttgtatttttagtagagacggggtttcaccttgttagccaggatggtctcgatctcctgacctcatgatccacccgcctcggcctcccaaagtgctgggattacaggcgtgagccaccgcgcccggcccctgccttcctcttatggtctcttcacgccagctcctgtacctgccaggctatggatcatctctggctttgcttatgcagtatctgtggcctggaaaattctttccttgtccagcctccttttggcctggctaactcctaccattctacagaggcccagctctgatgtctccccacctggaaggctctccctgatctccatctccccactaccctgagctggttggcagccagtcctagtgtggactccatcactgtaattaccacctcacataaattttcaatttatgggtatctgcttccctagcctctccccaggctgtgagttcttgaaggtggagactgtgacttagtcgccttttttccttttcagcatatactagatgcttggtaaaaattgggtggatggatggatggatagatgggtaaagtgacccaaaatagcaaggctatgggagagagaactctggaactctagagttgggaaactggccacccactggctgtgtgacattggacaagtcaccgcccctctctgggtccatttccccatttgtaaagtctcttctgactccaacagactggaattcttgaagattcctggcaggtacactgtgaatgaggggagtttgctcttctgccctaaatgtgatgggccaggttgagtgtgaaaatcctgaggttcccccttcccaacaagaaattcatcccctgcctgtcttctaccccacatggtacagtgataccctcccccctggggcttttacctctttgtggctgcaggtggcaggtgctctggctgaggctggtgtggggctggaggagatcgcaaagcaggtgaacgtggtcgccaaggccatgggtgagtgctggcctgggagctggggaagagagtggggaaggttggacagccctggggcgaggagcaggttcctgttggctgcctagcggtgctccccaggttattccccaggggtctagggagtgtatccctgggggagctcctggggactggtggccttgggtaccatggctgaggtggagagtctggcagcctttctcagagaagagggtacctgtgggcagggcctctgagatgctgctgccacccttcctgatgcccagtgctaagagtggaacagtcatcccttcatgccttgtttctcataggtaccctgggggtgagcttatcctcctgcagcgtccctggttccaaacccaccttcgagctctcagccgacgaggtggagctgggcctgggtaagcttgtggccatccatcccagccctgcctgctccttggccctggactttgcccaccttgcatacccttagagccatcaacctggtcctctccccaggtggtcttagtatttttacctggtcatttgaggcccagcctggccaacctgcctgatttctacctgctttgctgtctatacccacagctttggccatgtggagctctgtgcactgcccacctcctagcctttgcctgccattcccaggtcctcctgtccctgccagaatacacccttctttcaacggctgttcaaagatcacctggctgcaaagctttctttcctcgcctgtgcttcctccttaactatctctagttaaagctatctccaccaccaggccacaagctcccagagaacagagatcgtgtttttcattattctgtccatttccatcccccactcccgcccacttactgtgtgagtccagcactgtgtgagtccttgataaaaacgatgagcaaatccccaggccttgagtgggtcagcagtgaccacatctatccgcagggatccacggggaagctggtgtgcgccggataaaggtaggtggtccctctggcacaggccgccctaaggccaaggccccccagatgcagctcattcctggctccctctgacagatggcaaccgccgatgagattgtgaaactcatgctcgaccacatgacaaacaccaccaacgcgtcccatgtgcctgtgcagcccggtgggtagcctctcgcccgcgtctcccaacccctcctaaacctctggggaggagacgcccagagggtctcacctggggtgtcatgtctacccgcaggctcctcagttgtgatgatggtcaacaacctgggtggcctgtcattcctggaactgggcatcatagccgacgctaccgtccgctccctgggtgagccatgcactgggaaggggatcctacagccctttggaaagggctgagggagggtcttgtgatggcagagaacacggactgtgcgtcagataagcctgagttaaatcgtctctctgccacctaattgccggataccttgagcctctgtttgttttcttgtctgcaaattgggggtaataataatggtacctgctttataccgttgttttgaggattaagtgagattaaacatatgtaagacactcaacacagcgcccagcacctggcacgaactgagtaaatgagacctgtaattactcatcttccccgacgtaggggacacctccagggaacgtggtcatttgtggggttattgagggatgcctgccaggaggaaatcaggacatctccctcccgacctcagagccccagcttccaaggtccttgcttttctgttgttttctttccctgatgcccatttttcccttttggactgccacactctggtattgcagagggccgcggggtgaagattgctcgtgccctggtgggcaccttcatgtcagcactggagatgcctggcatttctctcaccctcctgctggtggatgagcctctcctgaaactgataggtgagacttggaacctggggtcacccaagccagggctccttgtaactggaaggagccagggagacttggagaccccgtcagggctgaccgtgacaatcagggctctggagcctgtgaagaaggctcttcctgggcttctccagccttctccagctctcactggactagaaggagttggtattaggatcctcctcagagaggcctgaccctttcccagggaccctctctccatacccctgtatacagtaggcactcagtccatgcttgtcgaggtggactcccttcctccagggctgctgagaaagccaggccaccagggtcaggatgggagggtccaagccctgctgaatccctggctggacagccgtgtctaagagagttatcttgctgcccttagatgctgaaaccactgcagcagcctggcctaacgtggctgcagtctccattactgggcggaagcggagccgggtagcccctgccgagccccaggaggcccctgattccactgctgcaggaggtaccaacccctgcctttggggaagggacaggcttcccaaaggatgcaggagtatacggtggggcgggtaggggccctggcacccacacctcccaccatagtcaagtgtggttgtgagaagggcctggtgggcctgttcttcagcatcctccctttctaggctcagcctcgaagcggatggcgctggtgctggaacgggtgtgcagcactctcctgggcctggaggaacacctgaatgccctggaccgggctgctggtgacggcgactgtggcaccacccacagccgtgcggccagaggttggtgccagggactttgccaagtgaggtcattcacaaaaccttagccccccttccacttgtttccctgaaggcagggaccttcctttttttttttttttttttttaagaaggaatctcactctgtcgctaggctggagtatgcaatggtgtgatctcggctcactgcagtctccgccccccgggttcaagtgattttcctgcctcagcctcctgactagctgagataacaggcatgcgccaccacgcctggctaattgttgtgtttttagtggagacggggtctcgccatgttggccaggctggtctctaactccccacctcaagccatccgctcgccctggcctcccaaagtgctgagattacaggcatgagccaccacacccggccgacagggaccttcttaacaccacaaatgtatgaggttgttatcttagaattaaatgaaatccttcacagtgaataacttacaactcaaggcgaacttattctgttgtccttatttttctcagtttacccagaccagtgaaaagctcttaactgtccagcatcattcattcgagaaaaaggtatttgtgtggccgtggggcaggcactgctctcagctgtggatacagtagtgaacagagcagacagaaatcactgccctcatggcttatgttctaggtggaagacagtcaaccagataaatcagtaaaacacagaggatgttagcacaaagggctaaggagaaaaaaaccaagccagggagcagagtacagagcgtcaagtggagggcttcggggcaggcctcacctccccaggcccctttcggttacgcagcccagcccctctccagactgcacactggatgtggaaagggatcttgggaagccttcattccacttccctgtcggccttttccagccttcattggtgctggctggaagtctggcagatggagggaggatctctgaattcctccccatctctctctgcctgcagcaatccaggagtggctgaaggagggcccaccccctgccagccctgcccagctgctctccaagttgtctgtcctgctcctggagaagatgggaggctcatctggggcggtgggtgcctgggggctgaagggctgacagggaggtggctgggctggctggggtccaggccagcaccacatgctcagcgttgtcatcttccccagctctatggcctgttcctgactgcggctgcacagcccctgaaggccaagaccagcctcccagcctggtctgctgccatggatgccggcctggaagccatgcagaagtgagccagagccctgtgcatcagaccaggggtgggctgggggaggtgtttggtgacatctgcgccctgccaggccctagcccaaccctcagagtgattcccttggttccctatagtgagcctctttcactctctttccctgccaggtatggcaaggctgctccaggggacaggactatggtatgtactcaggctgtggctcagacctttctccttttggccctgtaagtctaaagagcaccctcggttgcagggcccgtgctcagccccctttccttcaccttgtccagctggattctctgtgggcagcggggcaggagctccaagcctggaagagcccaggagctgatctgttacaagtcctgaccaaagcagtcaaggtgagtgaggctgggccagcaccctggggagacaggcttctagcagtcagactcctgtctccatgtgaccctgagcaagttaataaccttcctggaccgcagtttccttctctgtacaatggagatgagcacctatctcagaaggtggttatgtggctaaggaaatatgtagagccccgcacactgcctgggatgtgacagggcctcagtgaatggtgacccttttccctgctggaagtagatgagaagtgactttccatttggtgacagagcagagggtgctggcagagccagggcaagggcgtgcagggccaggctgcacggcagagacgttctgcccatggcaggaaggaggcggcctggtgatctgcccttgaacctgctcccacaccccatcccccagagtgccgaagctgcagccgaggccaccaagaatatggaagctggagccggaagagccagttatatcagctcagcacggctggagcagccagaccccggggcggtggcagctgctgccatcctccgggccatcttggaggtcttgcagagctagggtgtgtgactgcctcccttggcctcagctcctctcactgctgtgctgaggtggcctttgtcacttccttctgccttccaaccctcaccttcccccggcctgccccattggcccaccctctaagttgagcaggaaatcctccaccaagcttccagaactacagacagcacccagagtgagctggagtgggtcccatgcctctccagcatgccctttccctttgcaggagggtggagtccctgggtcatgccctcccctgccagctctgggcttcagagataaggcattttccttgtgcagcctttacctggcaatcctaatttggttttaagactccctgtgaaatgctttccgcaccttaaccccagtgagcgtgaaaaagaaagttaataaactataatacatggaagcaagaaagacactgcctcctctgagggaccttttcccaagcatgtaaacaagggggcccacagccctggctgcaggcatcatgacccatcttctaccaggcagatctttattacctgagcccctaaggcagtgtctcctcagctgggctgcttccactgagacccccgacccatcccctttccagtacacacacctgatgcatgtaagaatggtagaggggcttttcttagcattgaattaataattcagtggctcctcgggagtcgaatgggcatttgggacaccagaaggaaaagaaatcatcatagtctaaggttcagttgtagatcaaaaaatgcactcaggccgggcacggtggctcacacctgcaatcccagcactttgggaggccaggcaggcggatccttacactcaggagttcaagaccagtctgggcaacatgtgacaaccctgtctctaccacaaaatactcaattacgcaggca

SEQ ID NO: 1543 - DNA, 3254 bp, Homo sapiens
ggcttctctacccagggtcctgtctgtcggctgcaccatacgtccctgaccacaaggcatccacgtgcacaggagtatgcgcccagcagctgggaaggaggctgacctcagacggtggcctgtggatcccagctctgtcatttcctggctgggtgacctcaacctagtcaccctttttgagtcttgttttctcagattatgaaataggaaaaatttccttcctcgtgagataagcacgtgccattagctattaaggacacgcacataaatgagctgcatgtgaatccacacatgccattccatgaagacatcaaagagggatcatgtggatctttggtgccttccggttggcccctccctaggtctgtgagggtcagacctgtcctgaggcttttacaaattggcccagaactcatttaaccacagcatcatttcattagagggctgttattagagactgaatgtttgtgtcccccccaaattcctgtgttgaaaggctcacccccactatggtagtgtcaggacgtggggcctttgggaggtgatggggttatgagggtggagccccagagagtcctcacgccctttccaccatgcgaggttatggtgagaagatggtccctgaggaagctggcccttgccacaccccacctctgccagcgccttcatcttggatgtctacagcctccagaactgtgagaaataaacacttgttgttttagccacccaggctattatatttttgttatagcagcctgaacaaagacagctttgattcttaacatatttaatgaaactcgagcttcataaaccagtgaaatgcctacccctatggagacggggagctggtcatgggacccaggtgcctggaggacatcccagtggctttgaaggctccagccagtcaagacggtcaatattagcccttctgccaacatctggcaatgtgaggctggggtggacgttggcctgatgttgccaggagtaggatgctgatgctgccagagagtaggtgggctccaaaccccaggcttctcacttgcttactaagcacagcagtctgaagcttgggacctggcagtgcgtctttggagaaggcaaaaaagccacagcagcaacacttaggagcaagacccttcccgctctccaccctatttcctcccctgaagaagagcaacagctcaagctctagcatggcacagaacgctaggttgggccaggcaagcagccatggtggggccaggtgaagcaatgtgggtctcagcaaggaacccctctgaaggtggcagtggctcccagggctgctgcacactggacaccacaactttggcatcagctgcatggtgagctgcagagtggtcagaggggctggggccctgccaagagagcaaggccagacctgcccagcgggaggcaggaaggccctgatccagcaaggagaagtagaggaagtccacagccacctctgttactcatcgctactgggacatctggggacaggctctgttcttgggagagcaggtcaccaggatttgtagggctgcctgccggtgacagacacgtaagtcacagggaaaggccgggatcccaggcctcagctgtagcagcagctggaagaggtggagccgcacggtcacaatacatgcagacacagagcagcaatacgaaacagaacagctcagagcggtcagctcctcagcagaagctgcgtgggccgccactccccctttctgcaatcaccccatgatgtctccaccccacctcacatccagatggggctggatggcagagcagatgaagcctgctctgtggcggggcagcctaactgaaatgcacacctttatgggggaagtggacggacacctcacctccctcatgtttcacaccgtggactgcacttgagtcccagctcttcaccacatccctaggagtcttaagaggaaatcagtctgatttcttcagacaggagcagcaagagcggccagagcgaggaggacctcgtgtgaatggaggacctgagaggctgacgccaaggagtgcagaagccaaagccaccaaggaaagcagacaggcagcaagcagccagagaaggcaggcccagcacccaggcaaagccaccaaggaaagcagacaggcagcaagcggccggagagggcaggcccagcacccaggcaaagccaccaaggaaagcagacaggcagcaagcggccggagagggcaggccagcacccaggcaagaagtctgggcccagcattggaagaaagtcgcctgctgaaaccagccgggagccctgggaagagcagagcttcttgaggggagcacaggatgcaccaccacggagctcttgggagcccttgctgctgctcactacccatcatgcagcaggggctggaaaaacgagcagatgcccaggagttaatgacatgatccagaattacaccaggggcgaagctgttcagacagacccccagcctgcagggtggtccccatccaagccaccaaaatccctcagggaagccccaaagtccctgagcctggtacacaccccgtctccctacatcccatcaagacctgctctgagcactcagctggtcaccaggcacccatcccactagactagcccccaggctggtaaaggagaaatcacacacccttgtcacagtcaagcccttccttggggaagaagataaggccacacttcaccccacagaaccacagtgatttgggggggaaattctgtctcccaatggacagactggggagtcccagcatttcactgggatgcgctggtttgggaccagtgctccccatcagccaccctaactccaccctcaagttacttggtttcctgctgtgccacagggtaagtcttcttgtcaaggccccagcctttcgtgggagatccttctctagacctggccctgtcccaccctggaatgtgggactggaacccatacctgtctgtcggtcaggatccccggctctgggcgcttccaagatgaagccagaaggatgtagagcaccagcagcccaaaggccaccaccagcatcccggtgctgttggcaaagaccgcctcactgggcaggctgtggtatggcctggtggtgtttttcctgaagatgacaaaacaatgtgagccctcgagagatttttccacctatttttgtctagtgggagactcgatgtcactaacagagggtgagaaaaccttcccgggtccatatgtgatctagaattaaaacaccctttctt

SEQ ID NO: 1544 - DNA, 1244 bp, Homo sapiens
ctctgatcacagtggctttatctccatgaaggaggtgaagcaggctctggtcaactgcaactggtccttgttcaatgatgagacctgcctcatgatgataaacatgtttgacaagacctaatcaggccacataaatgtctacggcttctcagccctgtggaaattcatccagcagtggaagcagctcttccagcagttatgactgggacaactcaggctccattagctacacagagctgcagcaagctctgtcccaaatgggctacaacctgagcccccagttcacccagctactggtctccagctactgcccacgctctgtcaatcctgccagacagcttgattgcttcatccaggtgtgcacccagctgcagatgccgacagaggccttccgggagaaggacacagctgtacaaggcaacattcggctcagcttcaaggacgtcgtcaccatgacagctcggatgctatgacccaacccatctgtggagagtggagtgcaccagggacctttcctggcttcctagagtgacagaagtacgtggacctctctcttcttttcctgtccctctagaagaacattctcccttgcttgatgcaacactgttccaaaagagggttgagagtcctgcatcacagccaccaaatagtgaggaccagggctgaggccacacaggtaggggcctgatgaaggagaggatgaaagctgaatgtcccgacggccatgagcagttgagtggcacagcctggcaccagacgcaggagattctggtccttgtaatggagttagtgtccagtcagctgagctccaccctgatgccagtggcgagtgttcactggcctgttaccattagcacctgtgttccctcaccaggccatcctgtcacatgagcccattttctccaaagtggaatctgaccaagcatgagagagatttgcccctgggaccagtggcttggattccatcacacccataaatccttgggtattaacttctagctgcctggggctggccctgctcagacaaatctgttccctgggcatctttggccaggctactgcctccgcagctgggatccctcacttgcctgccacgctctgctcggcttccatctccaggggacagtggtcacctctccttgccaatactttttttaatttgcatttttttcatttggggccaaaagttcagtgaaattgtaagcttcaataaaaggataaaactaaaaaaaaaaaaaaaaaat

SEQ ID NO: 1545 - DNA, 916 bp, Homo sapiens
ccccgctctgccaatcctgccatgcagcttgaccgcttcatccaggtgtgcacccagctgcaggtgctgacagaggccttccgggagaaggacacagctgtacaaggcaacattcggctcagcttcgaggacttcgtcaccatgacagcttctcggatgctatgacccaaccatctgtggagagtggagtgcaccagggacctttcctggcttcttagagtgagagaagtatgtggacatctcttcttttcctgtccctctagaagaacattctcccttgcttgatgcaacactgttccaaaagagggtggagagtcctgcatcatagccaccaaatagtgaggaccggggctgaggccacacagataggggcctgatggaggagaggatagaagttgaatgtcctgatggccatgagcagttgagtggcacagcctggcaccaggagcaggtccttgtaatggagttagtgtccagtcagctgagctccaccctgatgccagtggtgagtgttcatcggcctgttaccgttagtacctgtgttccctcaccaggccatcctgtcaaacgagcccattttctccaaagtggaatctgaccaagcatgagagagatctgtctatgggaccagtggcttggattctgccacacccataaatccttgtgtgttaacttctagctgcctggggctggccctgctcagacaaatctgctccctgggcatctttggccaggcttctgccctctgcagctgggacccctcacttgcctgccatgctctgctcggcttcagtctccaggagacagtggtcacctctccctgccaatactttttttaatttgcattttttttcatttggggccaaaagtccagtgaaattgtaagcttcaataaaaggatgaaactctggagttc

SEQ ID NO: 1546 - DNA, 3396 bp, Homo sapiens
ctcagatcacattggtatatctccatgaaggagctaaagcaggcctggtcaactgcaattggtcttcattcaatgatgagacctgcctcatgatgataagtgagtctccgccttgcccttgggcctgagctggggcagagccacctgatagtggacagtaggtgggtaggtgggtgggtggacattctgaagagaaattcattgaccagggaggactgtggggaggaagctaggttcagggtgagatcccctagactgagagctcttttcctgagatctttcttaagttctagaccctgcctagttacaggttaacttagtttcctcttctgtagaatggtactccctcccctgtaggaaacagcagggaggggtcaggtgccaagcctgcagagaaaatgcagttctggatggggtggggctaaaggtgtccagagtaggaggacggtgcaacgcttgatgtgggtgtctcaggtgcaggcatctgggcctcagggcttggttctgtgaagtcgcctactccagcctggagagaagggctgcctcaatgggtcctgagggggacccttggccttcagtcttgaagccttcctcccctcctttccctcctcaccttcagacatgtttgacaagaccaagtcaggccgcatcgatgtctacggcttctcagccctgtggaaattcatccagcagtggaagaacctcttccagcagtatgaccgggaccgctcgggctccattagctacacagagctgcagcaaggtgcgggtcatggccggggcacgatgggcaggacagagctagactcttctctttacaccctaagatacaacaaaggggtttcctcttgttaccgaatgtccacctgcactacaaaatgctgttctcagtgcaggcctgcatccctcaccccttctttgacccagctggggcactgagccaagagccagggcaaggaaacacctgggtccagaatcagggctggaccctggagtgctgggtgagacggccccagccacagggagccttaaggatggaaacttggcaccttaaggactatgagaccagtgtgtgtggcttgggtgactcctttctctccagtttctagcatgtagaatggaaagagccctgaacagggctcagaaagatgggtctgttgccacctctgctagtggacagtttctttcccaacttttgggaccctgagcactctaaaagttgcagttggggaagatgacctgaggccacagccccaggtctggttccaaactgactgtgtaaggcagaaggccacagtttgggctcaggcaggttagtaagaggttgggggaggacccaagagggagctttgccacccaggagggagaaagggctccccagagagtctagtcctttgcccaggctgtggatttcattcagactaaggaggtctgtgggcaggagtgagtgcaccacatctgcccccagtaaaagggaggggagatgacctatagtaatcacctactcttgccagcttttgtcgtggatattagtaagggtgatattaaccacaacaaaacgtatttactgaatgcttgctatttttaataggcttatgtaattcattcttcccatgtgctaggtactatttataattccacacccttcaatgaagaatcccttataatctcccttttaccggtgagaaaactgaggtttagtgtaggtaacctgcccaagggcccgcataacaaatggagagctgaggttttagcctggcctggtaagttctgaacagaggaaggaaggaagcatcccagtgaagagacaggatgctccaagagaccttggagtgacagtgactttattaaaatagcatttaccaagtgctttttctgtgccagtcactgtgctaagtgctttacatgatcacccgttttaatccttactagaacctacaagttaagtattatccccattttagagatgataagatagggatagtgaggctaagcaacttgcccagtggctgactccagagcaggtcctcatacctctgctgtactgcctctgatgtctgccccaggcaaggtggtcctgggagctcaggcttccttttggaatgcaaacgaatcagagatgattgcggatagtccgttgtcgtctctgcaatcccctgagcctcagttgaagagacaataatggagatttggagaaagagggatgagggccttccacctaaggggagcatccagacacggtccctgttgtgtttctgacatcttagacagacccttgggatttctctaccctctttgtgcttctgtgcccatcctctcgaagttccttgaactgttgtgatccagtattcctgattgatggaggtgctcatggcaggtttttgtgtgtctggtctgtgtgcccctcttctccagctctgtcccaaatgggctacaacctgagcccccagttcacccagcttctggtctcccgctactgcccacgctctgccaatcctgccatgcagcttgaccgcttcatccaggtgtgcacccagctgcaggtgctgacagaggccttccgggagaaggacacagctgtacaaggcaacattcggctcagcttcgaggacttcgtcaccatgacagcttctcggatgctatgacccaaccatctgtggagagtggagtgcaccagggacctttcctggcttcttagagtgagagaagtatgtggacatctcttcttttcctgtccctctagaagaacattctcccttgcttgatgcaacactgttccaaaagagggtggagagtcctgcatcatagccaccaaatagtgaggaccggggctgaggccacacagataggggcctgatggaggagaggatagaagttgaatgtcctgatggccatgagcagttgagtggcacagcctggcaccaggagcaggtccttgtaatggagttagtgtccagtcagctgagctccaccctgatgccagtggtgagtgttcatcggcctgttaccgttagtacctgtgttccctcaccaggccatcctgtcaaacgagcccattttctccaaagtggaatctgaccaagcatgagagagatctgtctatgggaccagtggcttggattctgccacacccataaatccttgtgtgttaacttctagctgcctggggctggccctgctcagacaaatctgctccctgggcatctttggccaggcttctgccctctgcagctgggacccctcacttgcctgccatgctctgctcggcttcagtctccaggagacagtggtcacctctccctgccaatactttttttaatttgcattttttttcatttggggccaaaagtccagtgaaattgtaagcttcaataaaaggatgaaactctggagttc

SEQ ID NO: 1547 - DNA, 187 bp, Homo sapiens
cgggtagctactaccttggaccccccccagtagtggagggcagtatggcagcgtgctaccccctggtggtggctatgggggtcctgcccctggagggccttatggaccaccagctggtagagggccctatggacacctcaatcctgggatgttcccctctggaactccaggaggaccaaatgatggt

SEQ ID NO: 1548 - DNA, 975 bp, Homo sapiens
gatctgcccacctcagcctcgcaaagtgctgggattacaggcgtgagccaccatatctgacacatttataataaaaactactgcatttaattcctgcctcaaaatacagcctgtaaatcagacagtgtcttttttttctgagacagggtctctcattctatcaaccaagctggagtgcacctcattgcaaccttcaccttctgggttcaagcgatcctcccacttcagcctcccatgtagctgctgggactaaacgagcagaccaccatgcccgcccaatttttgtatttttttttttttttttagagacagggtttcatcatgttgcccaggctggtctcaaaatcctgggttcatgcaatccctccacctcagcctcccaaaatactgggattgcaggcgtgagctatggtgccaggcccagtgtctttttaatctttacttgctctgcattttaactctacgatcaatgaattcatggttcatcttatgtttatcttataacacacttcaaaagaaaggaaatatgatgttcaacctaacagtctttaaaacagagtataagttgcccctctgatacctcaggagtagaacttcctttcttaggcctgatttcaaaactacatattcactggcttctacttctcaactgttcttaaaactgagaatttggccaggcgcggtggctcatgcctgtaatcccagcactttgggaggccaaggcggatggatcatgaggtcaggagactgagaccatcctggctaacacggtgaaaccccatctctactaaaaatacaaaaaattagccgggcgtggcagcaggcacctgtaatcccagctactcgggaggctgaggcaggagaatggcgtgaacccaggaggcggagcttgcagtgatctgagatcgcaccactgcactccagcctgggcaaaagagggagactccatctcaaaaaaaaaaaaaacaaaaaaaa

SEQ ID NO: 1549 - DNA, 318 bp, Homo sapiens
gaactattgatacatgcaataacctaggtggatctcaaagtcattctgctgagtgaatgattccagttacatagcattctggaaaaggcaaaactgtggtgaccaggaacaagcatgattgccaggggttggtggtggggaaagcgtgtgactaccatggggtagtatgaggtgatttttgaggagatgaaactgttctgtgtcctcattgtggtagtggttacatgagttagtacatgtgttaaaactcatagataatacgcttccccaaggaatccatttactatacattaatttgttaaaaaaataaatgtaaaa

SEQ ID NO: 1550 - DNA, 1212 bp, Homo sapiens
ttttttttttaagtatttattgatcattcttgggtgtttctcgcagagggggatttggcagggtcacaggacaatagtggagggaaggtcagcaaataaacaagtgaacagaggtctctggttttcctaggcagaggaccctgtggccttccgcagtgtttgtgtccctgggtacttgagattagggagtggtgatgactcttaatgagcatgctgccttcaagcatctgtttaacaaagcacatcttgcaccacccttaatccatttaaccctgagtggacacagtacatgtttcagagagcacggggttgggggtaaggttatagattaacagcatcccaaggcagaagaatttttcttagtacagaacaaagtggagtctcctgtgtctacttctttctacacagacacagcaacaatctgatttctctatcttttccccacatttcccccttttctattcgacaaaaccgccatcgtcatcatgacccgttctcagtgagctgttgggtacacctcccagacggggcggctgccgggcggaggggctcctcacttctcagactgggcagctgccgggcggaggggctcctcacttctcagacggggcggccgggcagagacgctcctcacctcccagacggggtcgcggccgggcagaggcgctcctcacatcccagatggggcggcggggcagaggcgctccccacatctcagacgatgggcggctgggcagagacgctcctcacttcctagacgggatggcggccgggaagaggcgctcctcacttcccagactgggcagctgggcagaggggctcctcacatcccagacgatgggcggccaggcagagacgctcctcacttcccagaaggggtggcggccgggcagaggctgcaatctcggcactttgggaggccaaggcaggcggctgggaggtggaggttgtagcgagccgagatcacgccactgcactccagcctgggcaacattgagcattgagtgaacgagactccctctgcaatcccggcacctcgggaggccgaggctggcagatcactcgcggttaggagctggagaccagcccggccaacacagcgaaaccccgtctccaccaaaaaaatagaaaaaccagtcaggcgtggcggcgcgcgcctgcaatcccaggcacttggcaggctgaggcaggagaatcaggcagggaggttgc

SEQ ID NO: 1551 - DNA, 4685 bp, Homo sapiens
aaagagatgaaccctgccccttgcccagggccagtgccatggggaaggggcttgtggggaggggacccatgaatcctgaccactcttgaacccagaaggaggactttgggccaatttcggaggagagaagaaagtgcaacgtggggagagggaagtgaattgcagaggggagggggaaaagagagagagagagagagagagagagagagagaaagatggaggagaagaacttggattcccctgggtagatggaaactgcaaaaacccaaagcctccaaaactaaccaggtccacctaacaccccctccctcccctaagaagatggatgtcctcaaaagagaaggaacaaacctccttgggaatccacattttttgggggaatggaaaagctctgtctccctaactcaactgctttgcaaggggaaatcaagctgggagaatctttttctggccacctgtggggtaggttgtcaaaccaaacagagccaccgtgggacatcaagtggaagaacttgtttgcttgaaagtatctcagacccaaggcacctcaggtctctttgctgtgcctccactatattgtcgtgtgggtgtgtgtctgcacccacatcctcacacattgatctagatctgcctttatccactcgaattataaacagctcggcttgtccttgtcccatgtgtttgtagacacacatgcatactgtccaaagattagggttggtggtggcagtgcagcaggggagggacaaacaaccaagctatgggtgacagaggctctctcctggtgcctgcacctgcactctagtgaccctgggtgccgccagacccttctcttctacaaagaccccagcaggagtgggagggtctgcaatggcatcgccctgtcctgccttggccagaagcctggagctttggtttgaggaggtagagatatgtgtatccataggaagagatctgtcagaacaggcagctgttgagctcggggtgtcttccccaaggcatgtggctcagcagcaagaaaggcaagttgctcctgctggggccctggactctgccttagctcccacctctcagccttgttattgggtttcatgcccctggaccagccttatctcagacctgcttacctgcatgatgcctttttgggggctggggattgagtcttgctgctctgcccagccctgttctattctgcagggtccctgtgttggaattctccctggggaacctactttctgctcagtgaggctccggccagaaacctggagtccttatcctcccctctgtaagtgttttagggtctggcttttgcaggcaccctctgacctcagcagagctcctgggcctgctgcctgcacaccacatcgcctacctacaatgccaaagcctcactgtcaccctttctgccttggtttccctagctgagccacgctgcccatgcagcagagggcagaaggcttgcacttgggccaaagggcctaaggtccactggacagttgggaaaacacctgaccaccatttaaggactctaagccagaatggaaaattcaccaggactccattcttaagcctatgcgagtcccctagagagaggcattgtactgatatataaatattatataatatatacatgagacatactgacagaatctgtaagctaataaaatgtaagaaaaggttaaaaaaagaataggtaaattgacaagaagtatttattgtttttccatattgctttattgccttccttggggataaaccaattcctatccttttttatatgtgtaagtaaagcctgaagtgtagggggcctttgttcttgaagcagccagggtctccttgccctggccttggccttccctagactgtgtggggctcagcattgggaggggttgcacatgtcccagcctttggcccccttacttttcagcaagccaggggcccagcagtcagctcccaggatgtgtggggagctgtccctgactctgcaggcctgagcgagtgtgtgagcatgcggggacatgggtgtgtatggcacacataggtgcgtgtgtgtcttttgtattttttctcctccaaggagctgtgtcagtgtggacgttctgtttcagggagttggaaaggagggtgtctgcagaaggtggagagcaggggcagaggccccactggccaccccctgcttcccagagtgaaaccttgtgcctggtgaccaaagtccctccaaagtgctcttccttctgggttattcaagccaaatatctgggtttccccctctcctcattccctagcaaaccccaattatcttccaagataggagatatttcccatccccttcctttgtaaatatctcatctcccactggagagcccaggagcctattcctggcatggatgttctgtccacacttgaggctgggcggtgtatcagacccttcaagcagcctggctggggcccaggactgagtctggggtcagctttcacggtcgcttttcccttcctcaccacccaccacagcccaccttgcatgcatggccagcccctccactccagcctgagccatgtgtgcccctgcgggaggacccattcatgccagaaagctggtaactccctcccagcatccctgcggaaggagtcagtttctgagagtgtgacttttcaaggcgaatgatggggaagggttccccagtccccacagtggccccacctctgggccctgcaccagagcccttctgtgtcacggcgggctgtgcacccatgcacacacctacgcacacacaacactccgcactgcagtatattcttgccaaagatttcctttaaaagcaagcacttttactaattattattttgtaaatgtttatcttcttctgtcttctccctccctgaatctattttactgttgtttattgttgaatctgtgtgtcagccaggagagcgctgtctggccttgaacatgggctgggatgggaaagggtctgggagaagatgggcaacaaagagccagggagtcatggacatcgcagcgacgcagaccccagcaggttcagtcccggtgctgccaccagctgtccagctgggtgtctggagggaagagggcagaggagggtcatgtcccttcagctgggggaggggcccagtgagctccacgtggctttttcccaaagggagcaagagggaaggattgggcgagaaaacaatggagaggggacctgcgaaggaaaacagggaggaagtgagcggtttgatcagcctgctatcacggtgttctggctctcttatttagccaggcgcttaagggacagatacatcacatcctaagtttgggaaaggcctttgacccatgtcatctgagcgtctcctccagtagctctgaaagctgtggacaccaatggccaggattccttctcccctggtttttgaggatccctgggtcttctgagactggccaggagagggatggtggggccagtggttgtgtgaaagcaggaggggcagccctcctggacaagtgtgatccccctataaacggctctcaggaggttagtgagtaggagattctgccttgttctgatgagcctgtgcaggggctccaggggagcatgctgtccagggggcacagaagggtggtgagtgtgatcaaatctagtctcactcccactttttagtctcactcctacttttgtccaccacccctgcctcctggatcttctcccactttttttttcagctttaggacctggggagatcctgtgagtcaaggcagacacccaatcctgcccccacactcggggtcctccaagaggttggggggcagagtcccagagcagccctttaccccaggtccaggccctggaatcctgagactcgcgtttccttggccagtggtaacacaggacgtgtgtgcgcatgtgcaagtgtggatgtatgtgtgtgcgtgtgttttgctcatttctttagggaacttgggagtcggggttggaggtgctgggcaatggaacttcaaattcaatgtcgcccagcagtgaggggagtcgggaggtgaggcctgtaggccaaccaattggtggagtctcagcgatagcccaggtgagaagtggttcacccagaggggcagggtgggggcctcgggcagatctgtccctcttggcacctctgtcctcaaatgtccaaaatgttggaggacctctgttcatatcccacgcctgggctcttgccagcagtggagttactgtagagggatgtcccaagcttgttttccaatcagtgttaagctgtttgaaactctcctgtgtctgtgttttgtttgtgcgtgtgtgtgagagcacatcagtgtgtgcaggctgtgtttccccatttctctcctcccttcagacccatcattgagaacaaatgtaagaaatcccttcccaccaccctccctgcctcccaggccctctgcgggggaaacaagatcacccagcatccttccccaccccagctgtgtatttatatagatggaaatatactttatattttgtatcatcgtgcctatagccgctgccaccgtgtataaatcctggtgtatgctccttatcctggacatgaatgtattgtacactgacgcgtccccactcctgtacagctgctttgtttctttgcaatgcattgtatggctttataaatgataaagttaaagaaaactctgtgcc

SEQ ID NO: 1552 - DNA, 8985 bp, Homo sapiens
cttctcttcctgcaattgctctatcacttcttccctctcaagtcccgccctttcagctacctccaactgctgaggaaccggttgcctaaaaggagccggcaaaagcgcctacgtggagtccagaggagcggaagtagtcagatttgactgagagccgtaaagcgcggctggctctcgttttccggataacgactacagctccgactgtcagtgccggccttcctcgtgtgaggggatctgccggacccctgcaaattcaatttctttcccattccgggcccttccctatcgtcgcccccttcaccttggatcatgttcaagaagtaaggacatgctgtggcctccatcggctgctcacaaaggcggtggggtgggggtggggaagagggcgagagctaagatcctctttctctctcccccgcccctgccatcctgactccctaaggttttctatagtactatgctctcactcccaacttgaacacttctttaagctttccatccgtagtccttaattgggtttcagtccctccactcccattgttttttctccttacccctctttctcttttgccccctcccccaattctgtctccattcctagggttctaccaatcacatccgtgcactgtgatttagaggcatattctctgtagctgagaggggagccctgcgctcactgccatatgtttattagttatgaactgaataaaggaaggcttgacttcctgggtcatgggagtgaaggagtctgggtgacaggaagcaagcggcctgtcatgcctattgcctagctgccagattaaccttgccttgaaaataacgattgccccataggctattcagtgtaaggaagacaaaaattccttgggaacctactagtgggtttgccttccagatttggtagacgcaaaaagcaaagggggaacatgggcaaaggaaggtgggttttgtgcatgaaattttgagcaaaaacgaatagggatcttagaaatcattattatcatcacttaaaaaaaatctcagcagattacatagcctagcaggggccgattttctatgttatgcttgggttggtcttttgtatctcaagaattgagggttttgttttctgatctcaggttttattattggtgggagcctgtgtttcttcctgggtagaattgaataagattttccaggaaaggcatttgtgtagctaattacagattatggtgcaaagtatgtctcatattcctccccctaaccccagctaattgctgtatacttgacagtttatttcaatattgtattaagacattggttttgtgctggacagagtaaaagggagatggtatttttttttaaaagaacaatttatttcataattaagtatctaaatacttggttgggaataaatgactaattagaacagtacctttaggtattctgatacctctacttagaaatgccttttcttttcttgcaaaaattacttggcagatttgatgaaaaagaaaatgtgtccaactgcatccagttgaaaacttcagttattaagggtattaagaatcaattgatagagcaatttccaggtattgaaccatggcttaatcaaatcatgcctaagaaagatcctgtcaaaatagtccgatggtaagtctttgtttttgtctgtgtaaagctcggtatagctgaatatttaatgattagattgcactcatactaaatggaattattttcagattaactattgatagattaataatggggtagacacagaataactctaaaactccaatatttgtattttcaaagattttctatgtccctgaaaaaatgtggctttgtgtattgattgttctagtaaagagttaaatgttttagttcagagttggatttaatttatttcagtttgttgtttagagaattgttttattgaattacctaacaatggaattaataaaatgtgaaataaaattggttgtagcaggtaatatttttctttttttctctactggacttgcatgataggaaaaacaatgtaaacaatattttttggccaggatttttactgactttttaagaaagtttatcactgtatatgcgtgttttatattgtgaatttttgaaagaaaatatctaacttggtactttgtgacatttgtcttacagccatgaacatatagaaatccttacagtaaatggagaattactcttttttagacaaagagaagggcctttttatccaaccctaagattacttcacaaatgtaaggtttttttatttttattttttgaaattttactcctattgcaatattcaaatgtaaagtcttgtaagaaatatgcatttaatcagataagacactgctgggggagaaaaacagaaatatgcatttgggaatactgaaagacacaaaaagagtttagagtgacttctgataattgactcattatttattagtactaggtaataatggatgtaaaactaaaatgaatgcccatcttgtggtaaatctgaaaaatgcagattctctcatgcattccagaaagcccaagaaagatcatttattaattcattcaacaaatatttattgccgggcacggaggctcacgcctgtaatcccagcactttgggaggccaaggcgggtggatcacctgagatcaggagttcgagaccagcctggccaacatggtgaaaccccgtctctactaaacatacaaaagttagccgggcgtggtcacaggtgcctgtaatcccagctactcgggaggctgaggcaggagaatcacttcaacccgcgaggcggaggttgcagtgagcagagatcacgccattgcactctagcctggggaacaagagcgagacttagtctcaaaaaaaaaaaaaaaaaaaaaaagacaaatatttattgaacttactatgtgctaggcattcagctaggtgctgagaatacaatgggaagcaaagacattgtctctgtccttaagaaactaatagtctagtttggagaataaacaacaattagataattacgcaaatatgtatttacaaactgtgataagcattgtgagcattttcatcttttatatttgtatctatttgcctaatagagaaaagtctatatatgggaaagcattgactaagtgtccttccgtccaggtatttcctgtgatgtgtgtaaatgcatttttttttaaaattgggctctctgttacatagtttttaaaaattgatacgtcatagctgtacattgtctgctgttgtggtgcctgtatcccccaccacctatatatatttataatagttgtacatattttaggggtacatgtgatatttgatacctttatacagcgtgtaatgatcaaatcagggtaattagggtatctgtcacctcaaacgtttatctttgtgttgagaagattacaattcttctagctattttgaaatatagagtaaatcattgttaaatataatttccttattgtactctcgaatactagaacttatcgacctgtatttttataccccttaaccaacttctcctcatccccttgtagtttttttttaaattaacaggcttttattttttagagcagttttaggtttccagaaaaagtaagcagaaagaatagagttccctctccccagttcagattcccctatgaataacatcttgttttggaatgatacatttgtaacaattgaaccagcattgatacattattattaacgcaagtccttagtttacattagggtttactctttgtattctacagttttatggtttttcccaaatacatgtcaagtatctactgttaaagtatcatacagaatggttttactggcctaacatcctttgtgctccacctattcatccttcctccccccacttccccaaccccaggtaaccactgatctttttaatcgtttttttactctgcgtttttcacttaacattatatcacaaaaatttcccagggcatattaagtagtctccaaaaaccatagttttgaaattacggtttttggagaatacttgggatgctgaggcgggaagattgcatgagtccaagagttcaaggttattgtgaggtattgattgctccactgtactccagcctgggtggcagagcaagaccctgtctcaaaaaaacaaacaaaaaagattaccaatttggtaaacaaatgatagtgtttcagagttttcttttgtatctgtcagattaatttggggaaatactgttcagatcctttgcctttttctgttgagtcattagtcttattattaatatattgtatatcttttcttacagatccttttatcctgccacaccagcaggttgataaaggagccatcaaatttgtactcagtggagcaaatatcatgtgtccaggcttaacttctcctggagctaagctttaccctgctgcagtagataccattgttgtatccttcccaggctaaaactgctgaaaaatgtattcattgtgctcttatcattactgcgaaaggtgtaccatccaagagaacattagatgtacttttttgaaggttactgttactcttatctcatgcctttctggttacatttgaagttgtacaaagtaattttatttgttgctactaaattatctcatcttaggtcgtttcttagaagttaaatgagaacaagttacagaagagtctcagctgcatttcagcccagtcagggcctactgttatcagacttaggacacaatagggaattcttgattactaggggaaaggatatagatgatataattggatcagctttttggatatcaacttgccactgtaatgttcattttgacttactgacatacgttggagtgaaagctctcaaaagggaaaagaatttaggcaccaggtataggtatctcttaccaagcaacaattttgtgttaggagtgaatagtgggaaatattggcaacctccaacttttattttgaaaattaattatttgaaaagttgagtttgggggcctcagagcacgttttctcaaagagaaatgtcagagtcccagatggtccttaaagatcgattcaactcatgacatagctgaataattctgcattatttccatttctaccatgctgtttcagctattttctggattaaatagatttttgtgactattctggacaggagaacatcttctcctttatcatagctaaagtagccatttgcctcgggtatagaaaaggaatggtacttggtgggaatagggaaactacttttagagtgtgtttatcttattttagtttttgagatggagtctcgctctgtcgtccaagctggagtgcagtggcacgatcttgtctcactgcaacatctgcctcctgggttcaagcaattctcctgcctcagcccctcgagtagctgaggttacaggcacccactaccacgcccggctcatttttgtatttttagtagagacagggtttcaccatgttggtcaggctagtctcaaactcctgacctcaggtgatccacccgctttggcctcccaaagtgctgggattacaggtgtgagccaccacacctggccaggggtgtgtttaagaagaataagaaaaaaaaatgatattctctgttggggcagttatagcgaagaggtagtataagtagtatgtttatattctaggaacagcttatgttgacatgctttttgcctaataggtgctcacatatttggaacactgagtgaattgaaaatcaagggagaaaagtgaggacgggttttttgttgttgttgtttgtttttaatatttattaagtgttggtaaatttatagttctggagttaaccttaaatggaaaatttccttagtacctagtctttacttttaaaaataatttttattttgaaacagttacagatttagagaaagttgttaaagaaaatggtacagagaggtcttgtgtaccctgaatcttgactttttaaaatatgtactgcagtgtttaacattccagaaacttcatatgttaaccaagaccactctggtttttctagaaaggttgaaactgttatatcaggctcttaaagatagactgggaatttacctattattttaaaacagcctttacataaaaccaccattcaggccgggtgtggtggctcatgcctgtaatcccagcactttaggaggctgaggcgggcagatcacctgaggtcaggagttcgagacaagcctggccaacatgacgaaaccctgtctgtactaaaaatacaaaaattagctgggtggggtggcatgcgcctgtaatcccatctactagggaggttgaggcaggagaattgcttgaactcaggaggcagaagttgcagtgagctgagatcatgccactgcactccagccgggtgacaaagcaagactccatctcaaaaaaacaaacggccggctatggtggctcacgcctataatgccaccactttgggaggctgaggcaggcggatcatgaggtcaggagttcaagaccagcctggccaacatggtgaaatcccatctctactaaaaatacaaaaattagctgggtgtggtggcacacgcctgtagcaccagctactcgggaggctgaggcaggagaattgcttgaacccgggaggcagaggttgcaatgagccaagactgcgccattgcactccagcctgggcaacagagtgagactctgtctcaagaacaaacaaaaatccccactagtcagtgatcagaataattaatcagaacaattaatatttattgatttcacagtttttagtatttatgtgcaagaaattttactccttttttgtgtgacttattctggttttgttagcatggggttatagtattaacatttgacttgaaagaaaaggggttattagatttattcatttagcatttactgagtatttacagtgtacccacagactctgctaggtctctgctctcaaggagttaatggtctaggagaagacacaagaggggttccaagtggcttaactagtaacatgatcattatttgacacccttcccttgatggggaggccccaaggcattttgataaatagttttcttagctgtgttctttcaggctatcatggcagaaggaaaacagcatgctctatgtgttggagtcatgaagatgtctgcagaagacatgtaagtcttactttaggcccccttaacttttgatatatgggtaaccaacccaggaagcatcagaattacaggtgaaatttgctatcatgcataccacattacacaaatatccaagcacagaagcttcatttctgatatttcctaacacttaggaagccaatgaaacctattttgtcttcaggattgtagtctttcttaagcactgaaaagaacccatgtgccaacacagctgttttatatgtgtgtacgtggtactttaggaatcttatttagtatcatttaaattgggggaggagggaagatgttttactgctagcttcattttatttatttttatttttatttttttaagtttttttgagatggagtctcactctgttgcccaggctggagtgcagtggcgcgatcccgcctcactgcaacctctgcctcccaggttcaagcgattcttgtgcctcagccttccaagtagttgggattacaggtgtgcgccataatgtccagctaatttttgtatttttagtagagatggggtttcaccatgttggccaggccagtctcgaactcctgacctcaagtgatccacccacctcggcctcccaaagtgttgggattacaggtgtgagccactgcacctggtcattactgctagttttaaaaacagtgatatatctcaccaccacacagtatcttatatcctgacctggtaatacaagaaatgtagaatatttagagaactagtaaagatatattatcaaaacataggcagtatatttaaaaattttagaacccatttgatgaccaaattagtggtattaattttgtttcagggttaatgtagcactttgatattcccctagtcttgtgacattgttactctggttctatagacccactagttagatcactaaaatcacttttagatatgagctgccacagagtaatgtagtttaatataaacaacaatgtaattgtgatgtcaataagttctttacttgtggcttaataattaaaaaataacaatatactttgaattatatttatcacgagtaagactataaaaatgcataaaagtatgtttatgtgttttttttccttctacagtgagaaagtcaacaaaggaattggcattgaaaatatccattatttaaatgatgggctgtggcatatgaagacatataaatgagcctcagaaggaatgcacttgggctaaatatggatattgtgctgtatctgtgtttgtgtctgtgtgtgacagcatgaagataatgcctgtggttatgctgaataaattcaccagatgctaaaattctgttagcttcagaaattattttaagttttcttaaactcaagttaaaattgggtagcaaacttggacattaaaaggtatctggtaagtaagcaaactcatacaactaatgtcctttcttaggctaatgatataagagtgaagagcaggacttggtcaatggattgccattttatggtagacctctagagaaactgtctagttaaatggggctagaaactagactaggaattttattctattactccaggggacccagcagtgctcattctcgtgtgtgtgtgtgtgtgtgtgtgtgtatgtgtgtgtgtgtgtgtgtgtgtgttttgttgattgtttttttaaaaaaaacttcaatggaaaattctaaacatattaagaagtctggagaatagtataatggacctctccatatccatcacccagtttcagtttatggtcagtcttatttcatctatacctcaattatttctccccaccccccaattattttgaagcaaatcccagacatcctatcatttc

SEQ ID NO: 1553 - DNA, 478 bp, Homo sapiens
ctcgaggccaggagttcaagatcagtctgggcaacttagtgagaccctgcctgtctctacaaaaaattaaaattcgccaggtgtggtagtgcatgcctgtagtaccaactactccggaggctgaggcgggagggtcacttgagcctgggaagttgcaactccaatgaaccgtgatcatgccactgcactccagcctaggtgacagagtgagatgctgtctctaaaacaaaaaacaaagtgaaactcttgattggcataattttgtttctctatcagctttatttttaaaaaaattacataagtaaaacatgtctctttagctattatctcttaaatcagattaccttctgtaataattctatgggaattattctacgggagcacagtcattcacgcttgtaaccccagcactttgggatgccaaggtgggaggactgcttgagcccaggactttgcaaccagcctgagcaacatagac

SEQ ID NO: 1554 - DNA, 5820 bp, Homo sapiens
  misc_feature (123)..(124): n equals a,t,g, or c
  misc_feature (1476)..(1476): n equals a,t,g, or c
gattcaggaaaatggctcccttatcaccatcctggtcattgctggtgtcttctggatccaccggcttatcaagttcatctataacatttgctgctactgggagatccactccttctacctgcnnactctgcgcatccctatggtaagactgggaagttgggcagttagcccatagtctaagacgtattgggaggtgtgggtgtattcctgggcatcagttatccttatctgtcattgacaaatcaggaactgtctcttaagctcacaacccctgaatctcacttctaatatagggcaaaggggtcgaggcaacaaccccaccttccgtaccttgtctcttccccaccccaccccgcagtctgcccttccgtattgcacgtggcaagaagtgcaggcccggatcgtgcagacgcagaaggagcaccagatctgcatccacaaacgtgagctgacagaactggacatctaccaccgcatcctccgtttccagaactacatggtggcactggttaacaaatccctcctgcctctgcgcttccgcctgcctggcctcggggaagctgtcttcttcacccgtggtctcaagtacaactttgagctgatcctcttctggggacctggctctctgtttctcaatgaatggagcctcaaggccgagtacaaacgtggggggcaacggctagagctggcccagcgcctcagcaaccgcatcctgtggattggcatcgctaacttcctgctgtgccccctcatcctcatatggcaaatcctctatgccttcttcagctatgctgaggtgctgaagcgggagcgggggccctgggagcacgctgctggtcactctatggccgctgctacctccgccacttcaacgagctggagcacgagctgcagtcccgcctcaaccgtggctacaagcccgcctccaagtacatgaattgcttcttgtcacctcttttgacactgctggccaagaatggagccttcttcgctggctccatcctggctgtgcttattgccctcaccatttatgacgaagatgtgttggctgtggaacatgtgctgaccaccgtcacactcctgggggtcaccgtgaccgtgtgcaggtgggccaggccacaggcgggagcaagccggctagcattcctgggaaaggcatacatctcaccatgatcctgatcccactaggtcctttatcccggaccagcacatggtgttctgccctgagcatgctgccgcgtgatcctcgctcacatccactacatgcctgaccactggcagggtaatgcccaccgctcgcagactccgggacgagtttgcccagctcttccagtacaaggcagtgagtggagttggagttagggcctgctagagactggctggtagctcggtggtgagggctgggctccctcctgctcgcttgtgaccttgtcccgcccttttaggtgttcattttggaagagttgctgagccccnattgtcacacccctcatcctcatcttctgcctgcgcccacgggccctggagattatagacttcttccgaaacttcaccgtggaggtcgttggtgtgggagatacctgctcctttgctcagatggatgttcgccagcatggtcatccccaggtactgggagaggagggagccaggtggcctgggatgatgctggaacatacagtgtctttgggaaaaccgcaaaaagacacctctcctgagtcacacaaaggcagtcctataccaggggcacactgcttgggagcctgggctggatttcagccctaattcgcacccttggccaagctcccttaagaaaggcacaacacggccaggcgcggtggctcacgtctgtaatcccagcactttgggaggccaaggcgggtggatcacgaggtcaggagatcgagaccatcctggctaacacggtgaaaccccttctctactaaaaatacaaaaaaattagccaggcgtggtagcgggcgcctgtagtcccagctactcgggaggctgaggcaggagaatggcgtgaacctgggaggcggagcttgcagtgagccgagatcacgccactgcaatccagcctgggcgacagagcgagactccatctcaaaaaaaaaaaaaaaaaaggcacaacacaagtaactggctcagcatgcagtgcagcccctcctgggtctgggggggcacagtgccctgggaaagattgacagtatactgtggtctccgttctccaagggtaaggcctccccactaacaggaaaggtgcaggaaggctcctggaagagaacagccctgcttactctgctcttccttgtgcagtggctatctgctgggcagacagaggcctcagtgtaccagcaagctgaggatggaaagacagagttgtcactcatgcactttgccatcaccaaccctggctggcagccaccacgtgagagcacagccttcctaggcttcctcaaggagcaggttcagcgggatggagcagctgctagcctcgcccaagggggtctgctccctgaaaatgccctctttacgtctatccagtccttacaatctgagtctgaggtgtgttcctggtgactgggagatgatgggcagagtggacttcaggagctgggagttgagggaccgggcatggggtggaaggcttcctgctgtctcttcagtatgtgccactggggcctgagatacagaatactagggaccccagagacctttctcttgcctcaagaattctacctacccgtttcgttcatagcccctgagccttatcgcaaatgtggtagctggctcatctgccgggccctccactgcccagagacctgcagggctccaggcacagggctgaagtcgcctctgccctgcgctccttctccccgctgcaacccgggcaggcgccacaggccgggctcacagcaccatgacaggctctgggtgagtaaatcggggccaagatgggagggcacggcagccctcagcagcttgtgtgggtctcagagaagttcacagctgctgtctgtctctgttgggagagacagggtggatgccaggacagccagctccgggagcagcgtgtgggaaggacagctgcagagcctggtgctgtcagaatatgcatccacagagatgagcctgcatgccctctatatgcaccaggtgagtgcacagctaaaaaagagagtagagggtttagatgcggagaagcaagaccggggttccaaacccttctctgccatttacttgttctgccacctccactcccatatctaccttcttaatatcctttttagctaagcctgctctcatccagggccttcacacactcgcagtttcccctgcctagaatccagttccctgggatatccagatggcctcctccttcttcttgggtctctgcagctgccgtttccctgagactttctctgatcactctcagtaaaaggctcccttgcccaccctcctgaatcttcctgtcttagttttctccatagcatttagcaccatgtgacatatcatgttttttccttatttatttgcttattccatatctcctctaccagtatataagcctcacaagggctggcatttctgtctgttttgttcactgctatctccccacacctaaaagagtgcctggcacttagaccgtcagtcagtttgttcctgaatcaaatgaataggtaaaatgagggccattacaacacaggcttcttccggggatctgctgtgaatgtaacctgtaaagatcagaggtatattacacactattaacataataggtgctctgaggcaaggattctcagggaaggggtaaagcgggaactgactgataccaggttggagggcagctgtttcagatggacatccgtctgtcccccactaacgagccccccatttctccagctccacaagcagcaggcccaggctgaacctgagcggcatgtatggcaccgccgggagagtgatgagagtggagaaagcgcccctgatgaagggggagagggcgcccgggccccccagtctatccctcgctctgctagctatccctgtgcagcaccccggcctggagctcctgagaccactgccctgcatgggggcttccagaggcgctacggtggcatcacaggtatccagtgggggtataggaggaaacagaggctgcagggaagggtggttcttccagggcctctcaaggggaggaaagaggtctgagagaacaggcccaaagactcaccccccaagcagccccccagccctgttcctcattcttgtgttccttctatgagtatgcttactcttacttgtctctccagatcctgcacagtgcccaggttccctctcatttctctcggctgcctcttggagggtgggcagaagatgggcagtcggcatcaaggcaccctgagcccgtgcccgaagagggctcggaggatgagctaccccctcaggtgcacaaggtaagcgcccggggcctaggaaaaactgccagaaatagtaacttccagggtgaggtaacagcttttcaggggaaggaagatatgccccacccccacacagagatactgtaccctcccttccaaaacacactaccccttcttttctcaactgctctgcagggcttggtttttccttaccttacctccccaggaatcaacctttcctgtccctttacctctaggtttctatggggctagcaggtatcaaccagaagctgaagactatctccattaccaaccctttctccccacaggtatagacaaggctgagcagggttcctgtggcccaggatggaggccaccgctgccctgccatcccgtctgcctgccatgggacggctcctctgagtgttccctggccccacgtgtgtggtgtttgtgtgtctgtgcctggccaagggaggtgccaacactgggcttgccacagccccaggagaggaatttggggcctaggaaccgagggcacacgggactctagcctcatccccaggacccccttggctcagagtgtggtgctagaaactggcccccagcccagccccagtactgccacctttacacctacccctgcaagtccccagaggctgcccacgatagaagctgccaagcagggagaacctgtgccaactgtggagtggggaggttgggcctggaccctcaacccctgcaaccttccctagccccctcaatagatgagcaggtcaggctgtggccattacctcacccgcagttctcgcccagtgctgcagccggctcacctctctccgcttcttgcacatcactggcctgtgtgtgctgcttgctcctgttctgttcgcttgctcacgttccgttcggcttttgctttgcgttagggtgaagacctagcgtccagctcccctcaacgctatattttgacactaaaaaagaaggtttctaaattgtaggagcaggatggaaatactttgctgcccttgccatcttttaggatgggcccccaggagactgaggtcttcctgggccctcattgctgcttatcgtaccccccatcacctgcacatgggacagaccgggctggagggtgaccttggctgtgtgcgtcccagcaaaagagctctggcgcgcatctcgctgtgccctgaagggggatggatgacgagtccggtccgaggctttgggctgctgcactgcatgctgggactgctcctactctctgtcccacccctcacccagctgtggtccggctttgggagagtggtgaattgcgctgcccgaactcggagcggagcagggtagggaccgtgtacagcttgataacccttaataaaaagggagtttgaccaga

SEQ ID NO: 1555 - DNA, 5836 bp, Homo sapiens
gattcaggaaaatggctcccttatcaccatcctggtcattgctggtgtcttctggatccaccggcttatcaagttcatctataacatttgctgctactgggagatccactccttctacctgcacgctctgcgcatccctatggtaagactgggaagttgggcagttagcccatagtctaagacgtattgggaggtgtgggtgtattcctgggcatcagttatccttatctgtcattgacaaatcaggaactgtctcttaagctcacaacccctgaatctcacttctaatatagggcaaaggggtcgaggcaacaaccccaccttccgtaccttgtctcttccccaccccaccccgcagtctgcccttccgtattgcacgtggcaagaagtgcaggcccggatcgtgcagacgcagaaggagcaccagatctgcatccacaaacgtgagctgacagaactggacatctaccaccgcatcctccgtttccagaactacatggtggcactggttaacaaatccctcctgcctctgcgcttccgcctgcctggcctcggggaagctgtcttcttcacccgtggtctcaagtacaactttgagctgatcctcttctggggacctggctctctgtttctcaatgaatggagcctcaaggccgagtacaaacgtggggggcaacggctagagctggcccagcgcctcagcaaccgcatcctgtggattggcatcgctaacttcctgctgtgccccctcatcctcatatggcaaatcctctatgccttcttcagctatgctgaggtgctgaagcgggagccgggggccctgggagcacgctgctggtcactctatggccgctgctacctccgccacttcaacgagctggagcacgagctgcagtcccgcctcaaccgtggctacaagcccgcctccaagtacatgaattgcttcttgtcacctcttttgacactgctggccaagaatggagccttcttcgctggctccatcctggctgtgcttattgccctcaccatttatgacgaagatgtgttggctgtggaacatgtgctgaccaccgtcacactcctgggggtcaccgtgaccgtgtgcaggtgggccagggccacaggcgggagcaagccggctagcattcctgggaaaggcatacatctcaccatgatcctgatcccactaggtcctttatcccggaccagcacatggtgttctgccctgagcagctgctccgcgtgatcctcgctcacatccactacatgcctgaccactggcagggtaatgcccaccgctcgcagacccgggacgagtttgcccagctcttccagtacaaggcagtgagtggagttggagttagggcctgctagagactggctggtagctcggtggtgagggctgggctccctcctgctcgcttgtgaccttggtcccgcccttttaggtgttcattttggaagagttgctgagccccattgtcacacccctcatcctcatcttctgcctgcgcccacgggccctggagattatagacttcttccgaaacttcaccgtggaggtcgttggtgtgggagatacctgctcctttgctcagatggatgttcgccagcatggtcatccccaggtactgggagaggagggagccaggtggcctgggatgatgctggaacatacagtgtctttgggaaaaccgcaaaaagacacctctcctgagtcacacaaaggcagtcctataccaggggcacactgcttgggagcctgggctggatttcagccctaattcgcacccttggccaagctcccttaagaaaggcacaacacggccaggcgcggtggctcacgtctgtaatcccagcactttgggaggccaaggcgggtggatcacgaggtcaggagatcgagaccatcctggctaacacggtgaaaccccttctctactaaaaatacaaaaaaattagccaggcgtggtagcgggcgcctgtagtcccagctactcgggaggctgaggcaggagaatggcgtgaacctgggaggcggagcttgcagtgagccgagatcacgccactgcaatccagcctgggcgacagagcgagactccatctcaaaaaaaaaaaaaaaaaaggcacaacacaagtaactggctcagcatgcagtgcagcccctcctgggtctggggggggcaccagtgccctgggaaagattgacagtatactgtggtctccgttctccaagggtaaggcctccccactaacaggaaaggtgcaggaaggctcctggaaaagaacagccctgcttactctgctcttccttgtgcagtggctatctgctgggcagacagaggcctcagtgtaccagcaagcggagggatggaaagacagagttgtcactcatgcactttgccatcaccaaccctggctggcagccaccacgtgagagcacagccttcctaggcttcctcaaggagcaggttcagcgggatggagcagctgctagcctcgcccaagggggtctgctccctgaaaatgccctctttacgtctatccagtccttacaatctgagtctgaggtgtgttcctggtgactgggagatgatgggcagagtggacttcaggagctgggagttgagggaccgggcatggggtggaaggcttcctgctgtctcttcagtatgtgccactggggcctgagatacagaatactaggggaccccagagacctttctcttgcctcaagaattctacctacccgtttcgttcatagcccctgagccttatcgcaaatgtggtagctggctcatcctgccggggccctccactgcccagagacctgcagggctccaggcacagggctgaagtcgcctctgccctgcgctccttctccccgctgcaacccgggcaggcgcccacaggccgggctcacagcaccatgacaggctctgggtgagtaaatcggggccaagatgggagggcacggcagccctcagcagcttgtgtgggtctcagagaagttcacagctgctgtctgtctctgttgggagagacacgcccgcacgccaggacagccagctccgggagcagcgtgtgggaaggacagctgcagagcctggtgctgtcagaatatgcatccacagagatgagcctgcatgccctctatatgcaccaggtgagtgcacagctaaaaaagagagtagagggtttagatgcggagaagcaagaccggggttccaaacccttctctgccatttacttgttctgccacctccactcccatatctaccttcttaatatcctttttagctaagcctgctctcatccagggccttcacacactcgcagtttcccctgcctagaatccagttccctgggatatccagatggcctcctccttcttcttgggtctctgcagctgccgtttccctgagactttctctgatcactctcagtaaaaggctcccttgcccaccctcctgaatcttcctgtcttagttttctccatagcatttagcaccatgtgacatatcatgttttttccttatttatttgcttattccatatctcctctaccagtatataagcctcacaagggctggcatttctgtctgttttgttcactgctatctccccacacctaaaagagtgcctggcacttagaccgtcagtcagtttgttcctgaatcaaatgaataggtaaaatgagggccattacaacacaggcttcttccggggatctgctgtgaatgtaacctgtaaagatcagaggtatattacacactattaacataataggtgctctgaggcaaggattctcagggaaggggtaaagcgggaactgactgataccaggttggagggcagctgtttcagatggacatccgtctgtcccccactaacgagccccccatttctccagctccacaagcagcaggcccaggctgaacctgagcggcatgtatggcaccgccgggagagtgatgagagtggagaaagcgcccctgatgaagggggagagggcgcccgggccccccagtctatccctcgctctgctagctatccctgtgcagcaccccggcctggagctcctgagaccactgccctgcatgggggcttccagaggcgctacggtggcatcacaggtatccagtgggggtataggaggaaacagaggctgcagggaagggtggttcttccagggcctctcaaggggaggaaagaggtctgagagaacaggcccaaagactcaccccccaagcagccccccagccctgttcctcattcttgtgttccttctatgagtatgcttactcttacttgtctctccagatcctggcacagtgcccagggttccctctcatttctctcggctgcctcttggagggtgggcagaagatgggcagtcggcatcaaggcaccctgagcccgtgcccgaagagggctcggaggatgagctaccccctcaggtgcacaaggtaagggccccggggcctaggaaaaactgccagaaatagtaacttccagggtgaggtaacagcttttcaggggaaggaagatatgccccacccccacacagagatactgtaccctcccttccaaaacacactaccccttcttttctcaactgctctgcagggcttggtttttccttaccttacctccccaggaatcaacctttcctgtccctttacctctaggtttctatggggctagcaggtatcaaccagaagctgaagactatctccattaccaaccctttctccccacaggtatagacaaggctgagcagggttcctgtggcccaggatggaggccaccgctgccctgccatcccgtctgcctgccatgggacggctcctctgagtgttccctggccccacgtgtgtggtgtttgtgtgtctgtgcctggccaagggaggtgccaacactgggcttgccacagccccaggagaggaatttggggcctaggaaccgagggcacacgggactctagcctcatccccaggacccccttggctcagagtgtggtgctagaaactggcccccagcccagccccagtactgccacctttacacctacccctgcaagtccccagagggctgcccacgatagaagctgccaagcagggagaacctgtgccaactgtggagtggggaggttgggcctggaccctcaacccctgcaaccttccctagccccctcaatagatgagcaggtcaggctgtggcccttacctcacccgcagttctcgcccagtgctgcagccggctcacctctctccgcttcttgcacatcactggcctgtgtgtgctgcttgctcctgttctgttcgcttgctcccgttccgttcggcttttgctttgcgttagggtgaagaccctagcgtccagctcccctcaacgctatattttgacactaaaaaagaaggtttctaaattgtaggagcaggatggaaatactttgctgcccttgccatcttttaggatgggcccccaggagactgaggtcttcctgggccctcattgctgcttatcgtaccccccatcacctgcacatgggacagaccgggctggagggtgaccttggctgtgtgcgtcccagcaaaagagctctggcccgcatctcgctgtgccctgaagggggatgaagggcgatgcctcgcccgaggctttgggctgctgcactgcatgctgggactgctcctactctctgtcccacccctcacccagctgtggtccggctttgggagagtggtgaattgcgctgcccgaactcggagcggagcagggtagggaccgtgtacagcttgataacccttaataaaaagggagtttgaccaga

SEQ ID NO: 1556 - DNA, 6487 bp, Homo sapiens
gttggcaggagggtcccggcccagagccagcggggccgtgctgagacggcgtacgtgccctgcgtgagtgcgtggcggcgcgcgtgcgctaggggagtgggcggtgaggcctggtccacgtgctccttcccgggacccccgcagcttgggcccagcggctacgtgagcaaggcacccggatgtccgcgccgctctccgagtgaccagtcccggcctccggtcccgcagtgcccgcagcctcggccggcgtccacgcattgccatggtgactgtgggcaactactgcgaggccgaaggggcccgtgggtccggcctggatgcaggatggcctgagtccctgcttcttcttcacgctcgtgccctcgacgcggatggctctggggactctggccttggtgctggctcttccctgcagacgccgggagcggccgctggctgctgattcgctgtcttggggggccggccctcgcatctctccctacgtgctgcagctgcttctggccacacttcaggcggcgctgcccctggccggcctggctggctgggtggcactgccgggggcgcccactgccaagctatctacttctggcctccgtgctggagagtctggccggcgcctgtgcgctgtggctgcttgtcgtggagcggagccaggcacggcagcgtctggcaatgggcatctggatcaagttcaggcacagccctggtctcctgctcctctggactgtggcgtttgcagctgagaacttggccctggtgtcttggaacagcccacagtggtggtgggcaagggcagacttgggccagcaggtgagggactctgtgggaagggggaagcctctgctggccgggcttgggagaaagcactgcatgtccagtcacactgcttccaggctttaggatgcctctaagcaaagggagaagggaggggctgagtcctgccgggagctgatagccagctggtggggtgtgtctttgctgagtcactgtggttttgcttttttttttttttttaagcctgtaagtgctgaatgtgttcatgacaccagtccccggccctattataagtagtaatacaatgaaattttatcctcaatgatactctctccacttatatttcattctaggttcagtttagcctgtgggtgctgcggtatgtggtctctggagggctgtttgtcctgggtctctgggcccctggacttcgtccccagtcctatacattgcaggttcatgaagaggaccaagatgtggaaaggagccaggtacacctcagtttctttttttttttggagacggagtcttgctctgtcaccaggctggagtgcagtggcgtgatctcagctcactgcaacctccacctcccgggttcaagcgattctcctgcctcagcctcctgagtagctgggactacaggtgcatgacaccacacccagctaagttttgtatttttagtagagacagggtttcacagcattggccaggatggtctcgatctcttgacctcgtgatccgcctgcctcagcctcccaaagtgctaggattacaggcgtgagccactgcgcctggcctctttttgtttttaagacggaatcttgctccgtcacccaggctggagtgtagtggcgcgatctcagctcactgcaccctctgcctcctgggttcaaacaattctcgtgcctcagcctcccaagtagctgggattacaggtgtgtacccggctaatttttgtatttttagtggagatggggtttcaccatgttggccaggctagtcttgaactcctgacctcaggtgacccacctgcctcggactcccaaagtgctgggattacaggcatgagccactgcaccagaccccacctcagtttctgaatcctggagtctcttcatttcattccctgtcatcattccttcccccaaaatgaaatgcttcttttccaaatctcagtttgcaacttagtttttctgaccccatcaaggatcacttgtgggtctgagatacctgggagctgtaaccccataggtttttccctgaagggtttctggctagtgcacttacttgatttctgagctcccttcctacgtgtttcaccatcctaggttcggtcagcagcccaacagtctacctggcgagattttggcaggaagctccgcctcctgagtggctacctgtggcctcgagggagtccagctctgcagctggtggtgctcatctgcctggggctcatgggtttggaacgggcactcaatgtgttggtgcctatattctataggaacattggtgagcaggaggagcaccagctcagtgtgctggtccttcatcagcctggtggctgggatggtccttacctagggaggtgggacagagctgggtggtcagaaagagactgtggctggtacctggggccattttgcctgaagagagtcctgggcgccataagtgggttctgactcgtttcctccacagtgaacttgctgactgagaaggcaccttggaactctctggcctggactgttaccagttacgtcttcctcaagttcctccaggggggtggcactggcagtacaggtatgagagactccgccctcaccctgctaggtataggtccctcccacaggcattccctcagcatccgcctctcccagcattcctccccagcccccatgtactctcagacctttcacatcctggtgctgggctgacgtccctcagctcccaggccctactgaggcgtcccccggctccctgcaggcttcgtgagcaacctgcgcaccttcctgtggatccgggtgcagcagttcacgtctcggcgggtggagctgctcatcttctcccacctgcacgagctctcactgcgctggcacctggggcgccgcacaggggaggtgctgcggatcgcgatcggggcacatccagtgtcacagggctgctcaggtgccgccccagtggaaagggcatgtgggagggtggagccggagaagcagggataggggcccgtgggaggaagagaacagaccccgcctgagaagctgccgctcccaccttggtgttttttaaagtataggattattgtatacatgctctcctaataacttaggtaatgcgggcagagggcaaatctctttcgagctgcacttactttttcagagcttcccactctgtttagtatgttgggttctgctctttttttgagacagggtcacgctctgtcacccaggctggagtacagtggcataatctctgcggcactgcaacgctctgctcccgggttcaagcaattctcctgcctcagcctcctgagtagctgggattacagatgtgcaccagcatgcctggctaattattagattttttgtagaaacagggtttcaccatgttggccaggctggcctggaactcctagcatcatgtgatctgcccacctagcattccaaagtgctgggattacagttgtgagccattgtgcccagctgggttctgcttttttgcatttttacatacatattatatatgcagactcacagaactaatatggcattgtggaggtttttcctaaaacaaatggtattgtgacatagccatcattctcagagttgcttattaacagaacattatggagatatatttttcttccatgcctgaaggtctccctcattcattgtaattgatacagagaattctgtagtttgagcatggttgatttagccacccacctcttgagggtagaattaattaagactggttccagtctgttgcttgaaaataaaacactaccctgaaatgcctagaggcagggttgctgggtctaagcccccagacctttcttattcacttgacctgccctcctagctacctggtgttcaatgtcatccccacgctggccgacatcatcattggcatcatctacttcagcatgttcttcaacgcctggtttggcctcattgtgttcctgtgcatgagtctttacctcagtgagtgctgctgggagacaccgtctccctgaactatccagggactcccttggccatgagctgtgcccccactcaagtgacccacctatgggaggctgtggattggtggacttgaatgggctcctagtgctcgtcatgtgatgggcgggtctcttctgtcaaatcaaaccttaacctagctgaggggctggggaaggacattcttgtcacgttaagtctgagccgtggacacaggtcaaggaagcctcgtttgtgtaacaagatgcagcttgctttcatttaccaaaagcgttttctacacatgagactttgtgcaggctgcagaggtgcctccctgtggaatctgggtgtccgggcttgagcataggcttagtgtgtacatggcaggtagtggacattgacatttggtctctgcttttggggatgatgtcctattctgctccccatcctgtcactctccagccctgaccattgtggtcactgagtggagaaccaagtttcgtcgtgctatgaacacacaggagaacgctacccgggcacgagcagtggactctctgctaaacttcgagacggtaacagagggcccggtggcagtggtgtgaggcgtggagatgtggaggagtgtaaccaggaccactggggctgacagagagctgggggtgtgatgtttgtgtgtgatgtttgaactcaggaaggaggattgagagttggggggaatgacccgagtgccatgtgctgtgcccatgccaaataaatttggtttgaattcatcaggtgaagtattacaacgccgagagttacgaagtggaacgctatcgagaggccatcatcaaatatcaggtgaggatgctagtttgaggcctccggagaataatgccctggcctggtagaattttcagggccaagagtgatagtcgagtgttggggtagaaggggcctgggcccaggtttggactcactgatggccattgtgtataggacattcctcttcctgtgttattgccctcagggtttggagtggaagtcgagcgcttcactggttttactaaatcagacccagaacctggtgattgggctcgggctcctcgccggctccctgctttgcgcatactttgtcactgagcagaagctacaggtgaggcaggatcttggatgagagagtggggcacaaggaaaagggggcctgaggcctgtgtctggtcaccaggctcttcggtaggaagtgggcagggtgacacaagaagagcggcctgcaggccccccgtgacatgctctgcttccttgattgccacaggttggggactatgtgctctttggcacctacattatccagctgtacatgcccctcaattggtttggcacctactacaggtaatctgagccctggccctcacctgtccagggcacattattatttcctggctactcagagaagtcctaaccagcacctttttgcaggatgatccagaccaacttcattgacatggagaacatgtttgacttgctgaaagaggagacagaagtgagcgaagggagaggagtagggtttggggagggaggagctgtgtggtgtttctcgtgcttggaaaacacaaagctgagaacctcagcacacatgggtggtgcccttccaggtgaaggaccttcctggagcagggccccttcgctttcagaagggccgtattgagtttgagaacgtgcacttcagctatgccgatgggtgaggccttccttttgcttcctttgcttttccgttcatttgcacactgccttcctgcttctcagtgctctgaatccctgcttttggaaaagagcctgggcaggggaggggcagggcctactagcagctctggtgatggaaggtgcctgctgagcaaccccacctttccttgcaggcgggagactctgcaggacgtgtctttcactgtgatgcctggacagacacttgccctggtgagaggagacccagccacttggcccagatgcctcaagcttccctcattcagtgcccatggtagcttgtgacccaggctgtggagtcagagagcccagtcacgataggcaaccggattgaatggtgcagcctccatggacactggtgacctcttggagagggaacctcaaaagccagtgggcctcggccggctgcggtggcacatgcctgtaatcccagcactttgggaggcttaggtggccagatcacctaaggttaggagttcaagaccagcctgaccaacatggtgaaaccctatctctactaaaaatacaaaaattagccgggcatggtggcgggtgcctataatcccactactagggaggctgaggcaagagaatcgcttgaacctgggaggcagaggttctagtgagctgagatcgcgccattgcactgcagcctgggtgacggagtgagattcggtctcaaaaaaaaagccagtgggcctgagatttttcccatttccaatgcaacaggtgggcccatctggggcagggaagagcacaattttgcgcctgct

SEQ ID NO: 1557 - DNA, 686 bp, Homo sapiens
gttggcaggagggtcccgggcccagagccagcggggccgtgctgagacggcgtacgtgccctgcgtgagtgcgtggcggcggcgcgtgcgctaggggagtgggcggtgaggcctggtccacgtgcgtcccttcccgggacccccgcagcttggcgcccagcggctacgtgagccaaggcacccggatgtccgcgcccctctccgagtgaccagtcccggcctccggtcccgcagtgcccgcagcctcggccggcgtccacgcattgccatggtgactgtgggcaactactgcgaggccgaagggcccgtgggtccggcctggatgcaggatggcctgagtccctgcttcttcttcacgctcgtgccctcgacgcggatggctctggggactctggccttggtgctggctcttccctgcagacgccgggagcggcccgctggtgctgattcgctgtcttggggggccggccctcgcatctctccctacgtgctgcagctgcttctggccacacttcaggcggcgctgcccctggccggcctggctggccgggtgggcactgcccggggggccccactgccaagctatctacttctggcctccgtgctggagagtctggccggcgcctgtggcctgtggctgcttgtcgtggagcggagccaggcacggcagcgtctggcaatgggca

SEQ ID NO: 1558 - DNA, 99 bp, Homo sapiens
aggccaaggtgggtggatcacttgaggtcaggagttcgagaccagcctggccaacatagtgaaaccccatctctactaaaaatacaaaaattagttggg

SEQ ID NO: 1559 - DNA, 125 bp, Homo sapiens
ggtaatcccagcactttgggaggccgaggcaggcagatcacctgaggtcaggagttcgagaccagcctggccaacatggtgaaaccccatctctaccaaaaatacaaaaattagccgggcgaggt

SEQ ID NO: 1560 - DNA, 141 bp, Homo sapiens
taatcccagcactttgggaggctgagacgggtggatcacctgaggtcaggagtttgagaccagcctggccaacatggtgaaaccccatctctactaaaaatacaaaaattagctgagcacggtggcaggtgcctgtaatcc

SEQ ID NO: 1561 - DNA, 207 bp, Homo sapiens
tctcagcactttgggaagccgaggtgggcggatcacttgaggtcaggagttcgagaccagcctggccaacatggtgaaaccccatctctactaaaaatacaaaaattagccgggcatggtggcgggtgcctgtgatcccagctacttgggaggctgagacaggagaattgcttgaacctgggaggcggaggttgcagtgagctgaga

SEQ ID NO: 1562 - DNA, 164 bp, Homo sapiens
cagcactttgggaggccgaggtgggtggatcacctgaagtcaggagttcgagaccagcctggccaacatggtgaaaccccgtctctactaaaaatacaaaaattagccaggcatggtggcaggtgcctgtaatcccagctactcaggaggctgaggcaggagaa

SEQ ID NO: 1563 - DNA, 146 bp, Homo sapiens
ccaggccgggcatggtggctcacgcctgtaatcccagcactttgggaggccgaggcgggcggatcacccgaggtcaggagttcgagaccagtctggccaacatggtgaaaccccatctctactaaaaatacaaaaattagcgaggc

SEQ ID NO: 1564 - DNA, 117 bp, Homo sapiens
atcccagcactttgggaggccgaggtgggtagatcacttgaggtcaggagttcaagaccagcctggccaacatggtgaaaccccgtctctactaaaatacaaaaaaaaaaaaaaata

SEQ ID NO: 1565 - DNA, 129 bp, Homo sapiens
ctgtaatcccagcactttgggaggccgaggtgggcagatcacttgaggtcaggaatttgagaccagcctggccaacatggtgaaaccccatctctactaaaaatacaaaaaattagctgggcttggtgg

SEQ ID NO: 1566 - DNA, 165 bp, Homo sapiens
cccagcactttgggaggccgaggcgggcggattacttgaggtcaggagttcgagaccagcctggccaacatggtgaaaccccgtctctactaaaaatacaaaaaaattagccaggtgtgatggcacacgcctgtaatcccagctactcgggaggctgaggcagga

SEQ ID NO: 1567 - DNA, 145 bp, Homo sapiens
tcccagcaatttgggaggccaaggcgggtggatcacttgagttcaggagttcgagaccagcctggccaatatggtgaaaccccatctctactaaaaatacaaaaattagctgggcatggtggtgcgtgcctgtaatcccagctac

SEQ ID NO: 1568 - DNA, 7000 bp, Homo sapiens
cggcccctcgtggtggcgccagatactcgcgctcctgcctgccagaccccgaggcccgcagcctccgcggatccgggcccgctcggcccctcccatggtgagccccccgccctttttccagagccttccacggccccgcccccccagcccctatcccgggctcacgcctttgtccgcagcccccgccgctccggggtgtcccctgtggcccgaagggtggtcccgcccggggccgggttcccccgtggagcacccggtggttcgcgccgcgctctcccctttgttgcgcgttcgggccggggtggggggttgggggacgggggcggggcgggctcatattactgctgactccgcggcccgatttaaacgcgggttgggggcggcagacaggcagccggcacgctcgcttgtttttcctattggagagttgctcgctctccgggcaggaaacctggaaatgggggcggggttgggggacagcggcgagggaggggcccgcgctttgtaccagcgcccccagatgtcgcacccgtgggcgttctccctggcggccgctccgtgcccgtggagtgcgcacctagaatacgcgcccgccccacatgtgggatgctttgatggactgccgtgagcccagaccttaaacgtaaacattcagcttcgcaggtactttgggctgcacacgcttctccggacccaaaagatgcacatgcttttcagaaaccgtaagtttacctggggctgtaaaaccgcacatcgcgactttgcaccgtgcacacgcttgccccgatgtgagatttcccctgggttcgcgctcgggtccgcttcttaaatacactgcctcagcggtgtggatggcacagagctgtggcagccctactgaaaccttaaacaggcttcctggggtcataaacatggataccgagacttagatcacctcccacaacttaaacgtaccccttcactccactgccttcgccccttcctgcagcattcgcatctagttgttcaaaagtgctttccgggtcctcagacatgcaccccaaggttttaaacctcagtgcaagtactagatgggcttccctgtgcaatagggatgtcaggcgcgcagttttgcacacgattgccaagatgtgagatttactttaggttgcaccttaaccgtcgtttttaaatatgatcgtcccatcttgatgtgctgctcctgctgtggaaggtatccctgggttttaggcaagcatatgtgttctttactatggctccagatcccagcatatttgaagtcctgagtcaacctgctctcctagacaagcagacattaagtatgtcgcttgggctcttaagtgcgttctcctgacttttacccatctttgtggcagtaaatgcatacgtgtcactgtatatgcggactagatacctcaggtcccagcgccataaacaacttgtatgttgtaagtgtaccctcatctcgaaagtcacctccagctgtgcgttttaactcatctcagatgctggatgtccggtatggtgcctgaagcccccggggcaacatccactctctgtccaactcattctaacgccaagatactcaggttttctatctgatcttctgacgactgcccaaaagtcagaatcacctgcgtgggtgaagaatcacctgcgtgggtggagaatcacctgcgtgggtggagagcaagtttgttcaggtttttctctttttaagcactcacaaaataaaattttttgtgtttgctagtattctggaaggaaagatctccttgtgcttcatagaaaatttggaaaatacctgtttgtaataagataaaaataaatcacccttataatttgttttcccccgcctggaggcgcctattacggggaaactctcgtgggtttcctgctgccaggctgtttgcggagctttcccttgtttgctttgagatgtttttggttttaaaaaacaataagtgaggtcaggcttggtggccctcgtctgtaatcccagcactttgggaggccgaggcgggcggatcacttgaggtcaggagttcgagaccagtctggccaacatggtgaaaccccatctctactaaaaaaaaaaaaaaaaaaaaaattagccgggcatgatggcgcggcttgcagtgagcgaggttgcagtgagctgagatcgcaccactgcactccagtctgggaaatgagtgaaactctgtctcaaaaaaaaaatagtaataaaaatagtggggagagtgcctgtgagtagcatttgtggcgttgcttggctttattgctagaactttctcttggtgttctacatgttttggtctgtgagacccctctgggggtgggtgtcccagctgtcttccaaatgtttcccccttttcctcgctgtctttctcctggatggtttagtcccctctgtgtttcttgtcatctccttcctgcctccccccggggtcagacttataaggccagagaggtgggcactggctgagccagaggaaggaattgaactttgggatgacagggagctttaggagagtttcagcctgggaaagacagggcaagctggtgtgtgggacagacacagcgcaacgcggcttgtgcctgtggaggctgcaaggaagccctggcccagctgggcacggggaaagccccctacagctggcttctaacttgggtctcaagaatcgatcaggcgcacagctggggcaaaggctggaggtggggctggctgaaggcttcaggactctgctgggccagtgtcaaggtgacagcaggctctgggaaggaagggtcctgagggtgggcagcgggaaaggacatgaggaccagcgtgtgggggtcctgaggggtgagcagagggtttggacatggccccgtgggcttccagcaggggatttggggctgaatattgggacgtcccctctggggtgtgtggggactgcctgtccttgcaggccccggcctcagttttcccacctatcccccactccattgcaggaaggtgctcgggtcttcggggcactgggtcccatcggtccctcctcagcctgggctcaccctcgggggtctggccgtgagcgagcaccggctcagcaacaagctgctggcttggagcggcgtcctcgagtggcaggaggtgagtctctgtggggctgcggctggcctccagggtcttgtcttgtccctgcggggacaggccagggcatctaggctgtgcacagtgacgcccctcctgcccccacagaagcgcagaccctactctgactccactgcaaagctgaagcggaccctgccctgccaagcctacgtgaaccaaggcgagaacctgtgagtgccggggcgtggcagccagggcggtggcaggggcagtggctgtggccgtggggatcagggcagccctttctgaccagctccttcccatagggagaccgaccagtggccgcagaagctgatcatgcagctgatccctcagcagctgctggtgagacccgcccctcccaccccacccactctgagcacccccatgcctggctgacccagctgtctgtcctgtcgcccccagaccaccctgggccccctgttccggaactcccagttggcacagttccacttcaccaacagagactgcgactcgctcaaggggctctgccgcatcatgggcaacggcttcgtgagtggggcgggctcccttgtagcactgtggtgacaagtacagctggaggcagcgctctgctcacacagtccaggcgggggtcggggggtctcccctggggccgagggtagccctcgtggcctctcggaccccatctggaaatgactgactccaggcaccctccgtagagcacagggtgaaggaactcagcctgagaggcctccagtttctgcatctgtgcccagcttcgaggtggccctgggggcgtgagtgcagggagggactggggccagccctgttggggcccaggagcctgtcggggacacatagcgtatggcagggacctggtaaatgggtgtgctaggcacaagagccagccaggagggagtggcacgttggggcttggtattctggtctgtaaaatgggctaacctccccgagtggcctgagctggccgtgagggagcagagctgagggtgctgaagcaggcgcggtgagtaggtcctcaggcctggcttcaaggggacccaggtatccagccagtggctgtgcagggactgagtggggcaggcgcggccatgacctggacccggggggctgccaagggatctgagagcggcttccgcagcactccagggttgggctggttgaggggtagagatgacattttctgaggtagggaggacaggggagccgtgcttcctagggccaccgggaggctggagggagggaatttgtgtaaagcgcttgagatggtgactttagtacctagtgagtgctgggtgaacccactggtgaggctgttcaggtgactgagattctggcgcagggcaggtcagaaagggggcttgggctgtgaaagatggcaggtgctggagaggaggcaggggtggggtgggagcgagttgtctgcccagaggacctggctctgggacattcccagtccctgttccctgttgggacagtctgcctctacccgtcccagctgccgttgagcgccctgggttccgctaggcctcccttctccctcaggagaccaggggcagaccagggcttgtgctggcatgaggtctcttaagtgacccgttcccccttcacccagcaccgtttgttgagggctgcatatctgggccccgagtacccagtctgtagggaaagtggacatccatactcaccccccaggcatggcctgggaggctgactgtgcatggctccagggaggccagggacagggccctgagcgggtgatccctgggctggacaccaaggttgagaagttaggccggcagcgtggaggggacagcactgtgggggtggccggtgtggggaggggacatggggttttgggacggtcacaccacttcatctagacaccacagccaggcacatctgtcaggcttagttctcccatgcgccatcctcaagaggcaccagcactttatctgttgagcctttatgtggcaccaactgtgtgcactattacccggttttacagatgatggaggcccagaagcaggaggtggctggtgttaggtcacacagctaggaggcagcagaacggtggggcgctgcctgtgctcttaacccccaggccaagtcaccccatcaggcagtcaggagggctggcggcagggggtgatgtgggtgggaggtagtgccttcttggcattctcaccgcagcctgggtgccgggtgccactctgacctcagccatggcagggtcgggggatgccgatgggcgctgcacgggctctcagaggcccctcacctatggccatggccttgactgtgggggcctctgtccaccgatgatctcccttcatcccctacaggtggggcggtccagggtggtgggggcacagtggccccgggcagtgaccacagggtcctgacccgcggcccccgcaggcgggctgcatgctgttcccccacatctccccctgtgaggtgcgcgtgctcatgctcctgtactcgtccaagaagaagatcttcatgggcctcatcccctacgaccagagcggcttcgtcagtgccatccggcaggtcatcaccacccgcaagcaggtgtgccagccaagcacagcccctctggggacagagggggattagaccccactgccctggttgggcagccagacttggtgtgggcggagtgtgatgcgatggctggagcaaggagctgcaggggagcccggaggatgccgggcgggttcccaccagggctccatggaaaagcggccactgggcggctctgcagggctggagggtgggtcttggcgcggcggcagggaagccagcggagcggggagctgggcaggggttgggatcgtcctgcggctggaaggccctgcctggtaaccacgtgtcctggtcatgccttgccagttgaggcagactctgcaggtcctgtgcaccaggtgagggccgggacctgtctcaggccactggggagccatggggggctgtgagcagatgaggggcagggcctgttcccctgggactagagaatggacccagctggggctaacaggccaaggctcggagggagggatggcaggccccaggacagacagacaggtttcccaggagcctgggcccctcttcccaccccgttcccttccaacaggcagtgggacctggtggtgtcaactcaggcccagtccagatcgtcaacaacaagtttctggcatggagtggtgtcatggagtggcaggaggtgagcactcggcagcccagggacttgggacccccagatcctcacggactgtggctgggaggggacactggcattgggggtctccagccctgagggctcctctttgcctctcccccaaaagcccaggcctgagcccaacagtcggtccaagaggtggctgccatcccacgtctacgtgaaccagggggagatcctgtgagtgctgggctggggggtggaggcagcatccaggggagctggggcttcctgaccctcgtccctttgtgccccacaggaggaccgagcagtggccaaggaagctgtacatgcagctcatcccgcagcagctgctggtgaggggctggggccgggtgctggagcctgcacgcagtagctcttccagagggcggggctgggggcaagagcgcctccccaggtggcctgagctggctgtgagggagcggacctgatcggtgctgaagcaggtgtggtgggtagctcctcaggcttggcttcaaggggtcccaggcagccagctggtggctgtgcagggactgagcggggcaggggcagccacgacctgcacctggggggctgccaagggatctgagagcggcttccacagcactccagggttgggcttggtgagcggt

SEQ ID NO: 1569 - DNA, 125 bp, Homo sapiens
catgcctgtaatcccaacactttgggaggccgaggcgggcagatcacgtgaggtcaggagtttgagaccagcctggccaacatggtgaaaccccatctctaataaaaatacaaaaattagccagg

SEQ ID NO: 1570 - DNA, 134 bp, Homo sapiens
ggccgaggcgggtggatcacctgaggtgaggagttcgagtccagcctggccaacatggtgaaaccccatctctactaaaaatacaaaaattagctgggcatggtggcgcatgcctgtaattccagctactcagg

SEQ ID NO: 1571 - DNA, 131 bp, Homo sapiens
agtcccagctactcgggaggctgaggcaggagaatggcttgaacccgggaggcggagcttgcagtgagccgagatggcgccactgcactccagcctgggcgacagagcgagactccatctcaaaaaacaaa

SEQ ID NO: 1572 - DNA, 755 bp, Homo sapiens
tgaagtagaacatgcatgagaaagaatgcagaaatcatgaataaacagctccagaaagggatcacgcccaactaaccagcacccgaattcagagcccaccagcccccgggatcccggccacgtccactctgaccccatgcctgcaaggatagggtctctatcgtgacttctaaccccaccaggtacttttgcctctttttagaaatggaatcatacagtctgtactcttttgtgcctggtttgttttggttaacattgcgtctgggagttttatctctgtccagggttggcgaaccccagcttacaagccaaatctggtcctttgcctgttttcatatggcctgtgagctaaggatggattttatgtttttaaatagttgcgggggggggcgggggggggaggaaagaatgatattttgtgacgcgtgaaaattatatgaaattcaaatttgtgtccacaaattgactgggcatggtggctcatgcctgtaatcccagcactttgtggggccgaggtgggtgggtcacttggggccagaagtttgctaccagcctgaccaacatggttgaaaccccatctctactaaaaggtacaaaaaaatagctgggtgtggtggttgatgcctgtaatcccagctactcaggtggctgaggcaggagaatcacttgaacccgggaggcagagattgcagctgagccaagattgtgccactgtacttcagcctggatgacagagtaacactgtatctcaaaaa

SEQ ID NO: 1573 - DNA, 554 bp, Homo sapiens
  misc_feature (20)..(21): n equals a,t,g, or c
  misc_feature (31)..(31): n equals a,t,g, or c
gcagctgcagtcaagagcgnncgcctggccntcggcctggcctaagccctgcatccatgatgaggccggggcaggtctccctcctgggtcctgatgctgtttctgtgctcggctctggcttggcctcagccctggcaccagctctggccgcaaccctgaccctggctctgggccgggcactctgccggatcccagctccaaacccctccccggctccagatccacccccagccctactcctgtggaatcttctgacccaaaggctgggcacgacgctggtcccgaccttgtgcccagcccagaccttgatcctgtgcccagcccagaccctgatcctgtgcccagccctgatcccaaccctgtgtcctgccctgacccctgttctcccactcgtggcactgtcagcccagccctccctaccggcgagagtccagagtgggtacaggagcaaggggcactgctggggcctgatggctgaaggagacgccggcatcctcgggggcctggggaagttgtgtgttgtgcagtcagtaaaatcctcccactgcctccgg

SEQ ID NO: 1574 - DNA, 205 bp, Homo sapiens
gccagggccagccacaatctggagctccagtgtcctggcttccttcttgggcccaccagctagactttccagcttaacccacagtgtctcatcctggtccatcccactagtcaccactctctgttcctctcacttaccccttgctcttcaaagcccatacagtaggtatacaagtggacaaaaaaagttgctcatttatgcaatc

SEQ ID NO: 1575 - DNA, 1274 bp, Homo sapiens
ctgaaagcttttgggtctcactggaccatcaggactgctgccgcccctctggagagagcagctttttatttgtctgtagacagggaacatgatgggcactgacctcctgtaaagaataaaactgtgggccgggcgcggtggctcacgcctggaatcccagcactttgggaagccgaggtgggcagatcataaggtcaggagattaagaccatcctggctaacacggtgaaaccccgtctctactaaaaatagaaaaaaaaactagttgggcatagtggcatgtgcctgtagtcccagctactcaggaggctgaggcaggagaatcacttgaacccgggaggtggaggttgccgtgagttgagattggaccactgctctccagcctgggcaacagagtaaaactctgtcccaaaaaaaaaaaaagaatacaaccttgcaggatgtctctcctggagacagcaagagggagaggagggagagggctctttcttagaaaagaggcctttggtgagcccagaagtttgaaaccagcctgggcaattcagcaagatcccatctctacaaaaaataaaaaaaaattagtcatggtgccacttgcctgtggtccccactgcttgggaggctgaggtgggagaattgcttaagcctgagagttggaggctcagttagccatgatcatgccactgcactccagcctgggtggccattgaattctgcgtggattgcctcagtttgccttgtcagccaacttccactggctgccttggcactgccatgacagcacagctccacaccagagctggggtttctcttcagtcctgggtaccccttggcagagggatttgctgaggaaaattaggtatccttcctagccctccacacacttccaaaccagggctgcggatctgatggatgccaggaagacagccttgggctgagagtgacgtcactgcaagagttgagagccagcgtctaaagtgtccacggcatcctgggaggttttatccttggcgactctaatggtagatttttgtccaccttgttctatttgcttttgtttgtttttgatttttctgttttaaaattttaaggagagatggggtttcaccatgttgcccaggctggtctcaaactcctgagctcaagcgatctacccaccttggcctcccaaagtgctgggattataggtgtgagccaccgcatccagcccacattgttctatctgtatttcatgaaagcagttctgaatgagagtaaatcagcttcagggtgta

SEQ ID NO: 1576 - DNA, 39567 bp, Homo sapiens
tcacctcattagtgtccacctggcactgactgatcagcacactataacatcatgagaaagatggcgggaagatccctggtaattatacatttttacttacgtagcaacaaaggagagagcgggaagctagaaggcagcaggaacgtgaacagcgaaggagagaacaagaagaaaagaggcgtctagaggagttggagagaaggcgcaaagaagaagaggagaggagacgggcagaagaagaaaagaggagagttgaaagagaacaggttagttcacagataacatagcaggcatacacttgtgaagtttgttactttgcagagctgggggatttttagaaagtatacacacatgtgatgcatacacacatgtacacacatacacatatacttagaacttcagatgtatgaacgtggtgaaacacagttggaatgacaccaataaattcagtctcttgtcttaaaaagggtttataaatcattacactttaggaacctgttgaaaccagttaagtggtctctaaatagtataatacctgaaagatgtctgcatgtatcttctcaggcttggcttaaatgctgtagaccccaaatatatgggtgataattaacttttaaaaaaaaaatgaaattaaaaaccaacagtaagaaatttcttaggagaaatatttgaatatccagtggctaagtgaatactgtaatatatatcagcatgtaattctgtatatacacagcacattaaaaaaactaacattgatgagttcaaccaaaaaagatcaggttttaataatatttgcagcattttattaatgtcaggtatgattttatttagaattatttttttgtttcctgaaccacctgtacaaatacaatttgcccttagcccctttgcctttcttgtctttgaattgatctctttgttatgagcttggaataaagaaaaaaatgatatgtgaggaccaatttaaatagcacttggtatctgtattttaaacttataaaccatggtgttaactttcaaatgtgactgttcagctgccgtcctttatgcttatcatgtgtcttgggctttctaagcttgggtctgcatgctcctcggtgttttcccaggaatttcagtgacgctttttatgttacctaattgacgttgtcaaccatttaactgtgtagcgcgtgtgctttaacattccacttatgtttatacctggggtctgcaaagaggaaaacattcaagcttttaagaattaaatcacctagaaataatgattacagttcgatcatgagaggagggtgtgatggtagcaattcatctttaatgctctagtggcagtcattaaattttgtgaatagcaagtatttggcaccacttttaaaaaaaaaaattctaaaatcggttttattctgtttttccctgttctattgtgaaatagtaattcccatgttaacagtgctgtaggacgcatttcatttcagcataagtgtgtatgtttgtgtagatgcgtgttgtgtattgtttgttcattgactatgtgttaggacctttgtggtttggagaggacatgatttttccagctgtccctgtgttgagggcagaaaacaaatgagtgtactgacttgatctttcgagttaagatttaattctgttttgttcaaaaaagaaaatgagttgaaagtcaggttcctttgctccgtcacagttgggttaaggccacaagccttgctagggtaggtattgctgtagcatgtaccatggagggtcagacatagacacaagagacgtagatcccaggtcagaaccagatatgtttgtcagtagccttctgactaagtccgccccacccctctgcccacacccccccagttggcttttttggctcagttttctttgtaaagtaaggttttctaaggatttttatatgctgtaatttcaatattctcccagagatattggttaactaaaacttctgttcagcccatattgatggctatttttgtttcaaggtgtgcaccatgacacaaggggatggtcagcagtagacactcttaaaagggaatctgaatttcaggataaaatgtctcctcgtagtccttcttagtctattcctcttctagagcttttttccctgtccaaaaaaaggaagcctctttggcttgtaaaatgttttatgcttttcaaggttatttcatatcaatctcatgtctgaaccttacaaaaattcctgagggttgggagaggagattttggatgctcatttctcaaatgaggagactgagaaaaggggagctttagagcatgctagggatcatagagccagtcctcagtggaacagggactgaggcctcctggtatccctgtcctttataatacgcatgcagctttgaagtagggttttacccctctctataacatatttgggatgtgtttacttgttttcattgttataatgactaatcattctcttctcattgaaaagaaaaaccaccccatcctcacttcctgctgtctttctctccccttgtccttgtctgtctctgtctgtcacacacacacaagctcatcatggagcctgggtctgttcatttgaggagagttgcccaagtctggaatgtagtcattccaggtgcctttggaattgttagtgaaagcatgaatcatgtttgttgtattttattattaagcaggttttggttttaggtttcaaaaattggtgatctgtgcttgttacaaataatgactaataagcagatgtttactaatcagaaccctctgatactttttaattaaaatcttgatttctctggggtttaccaaccttaagaggaatggcatactgttttaaaattctgtatttgtttacaacagctgtgttctaacagaagtactcttagatcccttcgtgtatattatgggaatgcatatcatcatttgttagactccttaggtcttactggccaatttgaagttcttggagaaatctttagcaatagattttcttcaggtatttaccactaagtgaattgtcactaaaggtgattggagcaaatggttcttggtgctccattcaggtggttctgatgcttttctttgggataatttgattgctgggtgatttctgtgtgacaggagtatatcaggcgacagctagaagaggagcagcggcacttggaagtccttcagcagcagctgctccaggagcaggccatgttactggtaaagccccgcctctgtttcattctgtagcatcagggctccttcatccgtccccaaagttgagcaagctgtggtggtcaccagaccattttggttttgctgtgggcagccaggctgaaatagtgatgcccattttgtggtcctattgctagcacattgcaacatggtctttatttatttatatctctttaataagttaattgttcttgtttggtagaccaacaaggttttgaacagaacttggcactcagtgaacacactagaatgctgagggcagtaggttgaaagcacatgtcacaggatttttacctagtatctataccactaaaactcacatttaattgaattatctcttactctgtccaatgataattatggttagcaacagctgtgagatttttccacaggtaatgtgctatttaaaatcccagccattttgctttcttacaaaacacagagggaaaatatatggtcactttttttaaaagccgaacaaatccagagaagaggcgagctctccagtgtcccatagatttagtgttatcctctccctctccaaggagtgccgatggcgggagatggaggagcaccggcaggcagagaggctccagaggcagttgcaacaagaacaagcatatctcctgtctctacagcatgaccataggaggccgcacccgcagcactcgcagcagccgccaccaccgcagcaggaaaggagcaagccaagcttccatgctcccgagcccaaagcccactacgagcctgctgaccgagcgcgagaggtatcctctttcctttgtcacttagacattgccctggaaagtcgtataacgactcttcagaactgtgtcatatgagttctagaacgggccatagagtttagctaattatctggtttcttcattttctaactaggaaattgaatttcagaggagtggagggccttgcccaaggtttcatattcagtcagtgctttttccataaaggaccagagtgcctcagttaacatatcccagaagaacttgaaactgaactaaactaaaagattacatgacacagtcactcttaaaaatgtggatgagggaaagagtggtctgatgaactattctgccaagctagtataaagctaaagtgtgcctgtggctcaactttctgactttgcagatgtcaagatgccctgctagattggtgcattagggttacccagagcctcagagtaggctgcggcagggactgctcgggggtgcaagatgggcgacaggtgtgcctccagaggtgttgaatcccggcccacaggtggcagcagccttctattgtgtctgccctcacaggcagtagattctagaaacaagtgttctgtttgttctggagtgcttttatatttggtggagtgaaatgcattccggatttctgatgatagttttttagtctgttggtttagttgcttgtgacagattaatttttttctacttcatcatcatatacagtcttagaattctgagcaaggaggagagcttagagactgccttgctaatttttatcttcataaatattttctttttcctgaatctaatcctagcactgctttatgtaccttcttttttccagctacccctctcttttctggtagcagaagaaaacagaaaacttacctttagatttcttccacttttagactttctttgatatttctgcttttcccctactaacactgagttatgtcttctaattctctgatgcaggtggaagatagatttaggaaaactaaccacagctcccctgaagcccagtctaagcagacaggcagagtattggagccaccagtgccttcccgatcagagtctttttccaatggcaactccgagtctgtgcatcccgccctgcagagaccagcggagccacaggtagcgacagccagctttgctgtggttgaggagactcatgcaacggctcgctgagccgcaggcctgctgtaatatcacagtttagtttgtcaccacactgaaaaagaggagagattagcaggagtgagtttagactaaaagaaggcatagactcagttgatagggaaatatctttttctttctttttgagatttctatgtactcattaagagtatctagagtgagtgatttcttctaactttttgccttccctaactcaggtgttaagtgcctcctttttctgatacaaagatcttttagtttagtttttagagaactgggattataaatacatagagggagagccaggaattttctttgaagtattttaaaagtaagcgctttactgtgtgagccctggctcttggccagtcctatgaatgggccttagatgatgcccctgaaattgcatgcaaaatgtctttatttgctcaaatgtgtattttttgtgggggtggggggaatgaccttttatcagattctcacagggttcaagatccaaaaaagtttagatctagtgggttaggtgtggatttctctgaaataggccagggaaaaggctgtgacctctccttgggtctgctgcagcgttctagccttggctaggtgaggggaactgttgggccgatgctgtgtggctggagcagaacccacagtgctgtccatagaggagaacaagcaacgaagatcatggctaaagatcttagagatccttaaaatgccgattcctaatctcttgctgaaaactactgacttttagatattttcccgcttgccactctgtaatccagaatattaggaacaagttcttaaactcgagtttacttttcactggtgtttgcatgtgtgggggacaaaagtttatgttcttgtggcaggaaactgtgggatctgcagcatggaggagttaaaaaaaaaaaaaaaagggctggggcacagtggcacgtgcctgaaatcccagcactttgggaggccgaggcaggcagatcacctgaggtcaggagttcgagaccagcctggccaacctggcaaaaccccatttctgctaaaaatataaaaatcagccgggtgtggtggcaggcacctgtaatcccagctactcaggaggctgaggcaggagaataacttgaacccaggagtggagtttgcagcttgcagtgagctgagatagtgctactgcatgccagcctgagtgacagagtgagactccatcttaaaaaaaaaaaaaaaaaaaaaaaaaaaaggaacagctaggactgaggccagggctgtgtgagggtgagtgggtatttccatgggaccagcagttttttgagtcccaggagagctagcagatgggtagctccagagaggagaggatagaaaggaaagaggaaagcaggagagggtaactggacacaattaaaagaggatgagaagagagactactagaataggtctgaggactcgtgttctttagcaactttgcactgcttgaagattaaaagttttcacactgcaagttaaacttcgcataaatggacaatctttggccactaatagtttagaaaataggagtttctgaattatctaatttttgcatttgttatgaatttgtgtagtaactagaaagagtctcccatttcctcctcctgttcattctttgggggagacttttctcgtgtaggactctattttaaaactcatttttgattataatttcaggtaatactttgaattacatgctttatctctgaaaatcttaaacattttagaagtctaggattataccaatatctggtattatacaaatctcacctgtatattgtagaaatcatacaatagaactaatttcacatcttgtatttggaaaggttgaacaaattgattcagtattttcagtttatgtcaagtacattgatgtaatagatatgtagctatcattttttcagttgccatattgaacaatcattttagaacagtaaaacataatttaatgaaaatattttatggattttttcagagatcattttcccaatttagaagcaaccagataaactcagttgacaagtaattgtcatatttttgtaatttcccaagtggaaggaataccccaacaatagtcaattcagggaatccatggtactgaatatttttaaagaaatcacaattctttattttcatcactaatatgaaagtatatggagatacctgggttatgggtgtttgtagacttgggaaaaataagaaaaattgttggtatatttgaaaaattagctgttcttgagatattatagtctcaaaacgtggggtttgtctttgctcgttgaacgtgccattttgttactcgctctggtgtaaaatgtgacactgcaggtaatgtgaggatggctaggtaggtttgcacatttggcagtgcgctttatcttacaatttttctgcctctctctgcctttccagtctctgctttgacatggatgtgcatgcaacacatcataacccctttgggctctgagagcctctttgtggggaaaaaaaaaataaaaatcttcacattaactgctatctgtaatgtttgtctggatattaaaaagagttttccttgtaaatgtacatttgttcttttctacatactgtgttcccagaccacttcttcactttgaagtgtaactgtttcactgcgtggctgacctaacactgtaccaccccggtgtgtattccgcctctgccagttcctgctttggatttggtattgaccagaaaagccagttttatgcagaacgcattgaatgttttgtgttttgttttcttgtaaggtacagtggtcccacctggcatctctcaagaacaatgtttcccctgtctcgcgatcccattccttcagtgacccttctcccaaatttgcacaccaccatcttcgttctcaggacccatgtccaccttcccgcagtgaggtgctcagtcagagctctgactctaagtcagaggcgcctgaccctacccaaaaggcttggtctagatcagacagtgacgaggtgcctccaagggtaaggagcagaaagacagatgtgtgctgcttttttcctttttgttatttttttttaaagattatttattttaattatgggtatgcaacttgaccaaatttaaaggggcattgaaatttcaaagggactttttactggtgaggataaagttccatagttaggcaattctgtttagccagtggtcagttagcgttttatttttgttaaccctaaataaggtagcaaaatgatgtaagagtaagtctacaaagaataggcttcttaaacaaattcataatctattttagcagttttttatatgtttatacagaagctatgcagttttgcaatattaatgtcaaaatttttagaaaaagtcctataagaaaaattttattttctttttaaatgtaggggattttgttttgtttttgtgtttacataatagtgaaattaaacaaaggagcccatgtcaatttatttttcctcatttggaatttgcttcctctgaatattttcttgcttcctgctagtctttgcttcctgctgatccatttatagaccattgtttggtttctttgagcttattttcctgattctcacattatctcagcaaatgctttgtatgtccctgctaccaagcttcagtccaaacatcatttaaatgttacaggagcatagaaagcctgtttgtactggcttcttggatgcttgtgactaaattttctctccgattgtatcagtgtaggaccagggaaggagttggggtggggagtggaggtgataggaaggactgcttttaaatattaggactgctttaaaaatatattttggtagggaagtattttttttccttttcatgttttcaataatttaattgctatattttctacttaaaggttcctgtgagaacaacatctcgctcccctgttctgtcccgtcgagattccccactgcagggcagtgggcagcagaatagccaggcaggacagagaaactccaccaggtaaaagacaagtgagcactgagaacaggccttctgtgcagtctaccacagccttacattgtctgtttcataaaaatgctcttaaacacagacgttctggggctaagagattatcagttataaaaggaaaagctgccataaaatccatcaacgtggatggcatcaagttgatgtgtagtaaaaagtgggtttgaatccggatgtgtattatagcaactctgaaatttaaactacttttctctgtaagagtaaatggagggagcagcaaggaagggggagaagttctaagagaattgtgatcggggggagcttttcatctaagggatgttgtaaggcctgtggcataaaacagaaatcacaaacaggttactaaagaagtcactggttgacttcacagtctgcagtaaacaagtgaattcaccaaatactatcctttttaggttctagagctgctctgtccagtacgattagctacagaagcttccttatatttaaattaaagtttaagtttagttaaaatgaaatacagtggaaacttcattccttagtgcactgggtatattcatgagctctatagccacatatagctagtggctatgatattatccagctcaaatatagaacattttcatcataacagaacgcttcattgaccagcactatcatagggaagaaaagatgattatgttgaatgttttatatcttgatcatcactgaacctctaaagttagccttctgcgcatggaaccttggtctgacttgaggtgtcagatggatgatagcccaaaagctgcacagaatcctcagcactgctaatggcagggggactgtggtgttcttccctgaccaagtctgtgtcattaattcttacctagcacatgtgtgctttgggtccatccatggcaggaaatccatcccagctcatgctttctgtaccgtttccaacagcccatacaaaggactattctttgtaagtgtcagtttttgagaacagtaacaggcaggtgagagcagcagcctagaaacagaatatagttttgtgtataattatacaaatacggagtgttttcctaatattaagaactgacttgtagctgtgacagaaatggtgctgcttctacactgaacagtagcattgtatctcacacctgatgattttagatctactaatggtaggatatcatttagcatacaaactaaaaatcgataaaaatccatgaacaatgtcattatatcttttggtgaatttaatgttgagtgctgtttatagactgttttttgtctccctacactttaaagacattggatgggcacaccatgcacatgttggtaatttggtgctgcatctagagatgacacattagctgttctctcttcttcttttctaacagcagtattgagcccaggcttctgtgggagagagtggagaagctggtgcccagacctggcagtggcagctcctcagggtccagcaactcaggatcccagcccgggtctcaccctgggtctcagagtggctccggggaacgcttcagagtgagatgtaagctgcctttcctttcctttttccctgctaatgttttgagctgtgatccatatcttggaagtttgtcttaatctgtagtttgcgtgtagccacacgtcacaaaacaatgttttagcataggttgctagtgacaataatagtcatcctgattttaatcataaaggagctaaattttgagagctttatatatacctagcactgtgagcgctttacaatttagtgggattaactaactttcccaaggtaattggctaatgtgtgagctaggatttgaacccatttctttcggtctgggctccagagcctatactgtcatcaatattggttattttaatgtactcataatagatgagtgaatattccctctactgtattattgacataccatgacaaggtatatattgtgaacacgtgtcaaagtgagtgtgatgatggagggtttaagtaaagagtcaggaaggctgctggagccctccttgggccccctctgctctgtaattcagacctgcaggtggagagcctaccatgagtgggcagacaggagtgggcggggtgggcagggcagcttcataatacacatccatatgttgatatgtgtctgtccatcttgtcccttttgaacccaacagcatcatccaagtctgaaggctctccatctcagcgcctggaaaatgcagtgaaaaaacctgaagataaaaaggaagttttcagacccctcaagcctgctgtaaggattgtgcaggatcagttttacttatttcagacttgaatgagatctttctattaaaaatatgtggttgagaggcctgcagtcttttctgcgagggcccctcacagatttgaggaattataaggaatgacctaaaccccagacatacttgttcccttccattggtatcgtctgctttccctgtataaagtctcaagtgagtaaaaccttttttctgttgttccagccatacacttggtgtacagtcagccttacaaaattatgcagaacaaagtatagttcttatttaatgaaatttccttctaaggaaactgatgctttaaaaaaaatacaaaagaaagaaaagcctttttatctctttcttggcattaacctttacttattcttcgtgagttcagcatttacaatactggcttttagactaagtttttaaaaatcaccttcttaaactcactggttgcctaccttctgctttttggtacctggggtgatagttgtgactgcttctcacccttctcttttaatccctctgatgttacctgaccatgtaattgtgcacgctttgtggaattttaagcctgtcagagttttcatttcctgcttgaactgatttctgtacttctccctctccccttctttctcccgcgcttccttgtactgtgcattcctcatcaacgatggcttctcggactccacgaaactgcgctgtactgaagggcgaagtggtaagcgccatctctgaaaagttccacttcagagcagcactccgaccgcctgtcagctcagcttgtattcgagctgcggtcctgctccttcctcaacttgacttcttgttcttttctagaatttaaaaacctcaaactttactccagttttcttaacataacatttgctgtatttattgttattaaatgtagcttttttgagtaactgtttaaaaagcttcagctataaccacgaaatactaatagcaagactcagagcccatcactgttatttcagtggctcaagctcaaagaaaagaaacattctcaactatgaagaaaatagaaaaccaagttggaactgctagaaattaaagacagaaagagctacatagactgcgtttttaaaaagtgattacttttacataaaattccccaaaaaagatgaatttggagttttatatgaaaatgtggagtataaatagtaatcactcttgaaaattatatttggtggattgattgagtcttagagtatctcagtgtggaagagtaaagggaaactaagccttttgaacaaattccactattgatttctttctgatgttcccttttatacgtggtgtcacagggtgatgtgggtaaggcttgaaggagggcgttagggacgcccacagcctcctgcccccagcactcagggtcgcagtgtctcttcatgtgtcacagacttgtccatgaatgtggcaggttgtgaacagtcggtgaagtgagatgtcagtggcatcctagtgctcacttcactcctttcattttaatgtaggtttgaagttttttttttttcagtatgaggtaaaattctagatcaacaaatgtatatacacagatccttgagctttggtgtaaagacacatgtctatatgacaaagtcttctttaaaggggtcagtccagaaagcaagcctctagttaaataagcctgatttaaagagttttgggagggaagttatgtttctacaacttttattaataaaatattaaacctaaaatgttgattttagtaaaatattaatatttattactaaaatttcataaatatcctataactagtaaataaaaacattaaatattaaaccttagcgctttgaagtttttaataataaaagttgaagtaaaataaaaatgtgtctctcaaaaccttttttatgagtctaaagaagactttgtcatgtagggagatctccttacaacaaagtccaagagtctgtgtatatacatttgttgatctagaattttacctcatattaaaaaacaacagtaatactatcagcttaacataagcagatcttttttttattgtcatgggatttgaactgtatatgacatctttgacttttttttggtgtcttctattttttttttttaatctctctcttgactttatttggtcttttctatcaaaagccataggagctcactttctcatgaaactgggtaactataaaagtcttacaaaactgacattgtggcaatttatggttaaagaacttctcatcttctcctgtccctgctcctgcttgccttactctctcttttctgtcctttgctttaggatctgaccgcactggccaaagagcttcgagcagtggaagatgtacggccacctcacaaagtaacggactactcctcatccagtgaggagtcggggacgacggatgaggaggacgacgatgtggagcaggaaggggctgacgagtccacctcaggaccagaggacaccagagcagcgtcagtccccggtctcttttagagcggatgagagtattctctcagagcctgctttccactgggacctagttgttcctagactattccgtgaccccatgagcacttactatgtagttctcgtggattcagcagcaggtcgccttgtgtttccccttctcttcgttggtgtgtgcatatgtcagtgcttcccccagcaccccagcgtgtactttattttttccttttgatttgaggatatatgatccaggggaaatttcagtttggtataactactttaattagccataattattcattctaagtttttgctcagaaacaaatggcactggaaagaaattctttgttaaagggagaaagctaagcagttgcttttttggaggaggctttatatcggtagcctcatctcatgttttgattttgagaaggcgaaaagcctaaacaggatctccttgactccagagattaaggcctttcacgtctggattttttctccataggtcatctctgaatttgagcaatggtgaaacggaatctgtgaaaaccatgattgtccatgatgatgtagaaagtgagccggccatgaccccatccaaggagggcactctaatcgtccgccaggtacccgtgtcttctctgttgtcagaggctgagcttctcctgtggtcattaacccacttgctcattcactcactcatgctgtttctccatcatcatctgttttcatgttaacaagtcccagagggtcaagtgtcgagtgtcgggggctagggaggcaggtgtgtactgcatgcccagaaggtagcgagtagtctccaccccacatcgctgctcctctgcatgtctgcggcagccctcattcaagcaccgcgctgagtctcacagtctatgtctgagcgggagagaagccacagggagtccttaaacaggctcacagagtgaggaagcaggtctggagtctggcagagcagccaccatggctctgcagagcacgctgggctctgagtgtctgcagtgccacagtgggagcgggtgaggcaggcaggacgagcctcatcacaggcccagagactcggagagcagaagggttcgggaggtttctcttctatgttccaaaatgttagttttctcacttgttgaataattaaatgtgtgccacccagatatgctcagtttggatcactaagctttataactgtctgttcatttcttagcttagacttaattaaagtgatacgcttctcatttaaatagaacagggcacctatttagtattttggactttgccctaagtgtgtttcatgctatggcaatgcattcggatggaaagtaggaagaatgtggaaaagaccaggattcagagaatccacaggtactttctggagctttgcaaagaaagatttaaaaagaaaaaaaaaaggatactggttttggtaacagaagctagcgcaacagataaaccagattaaacactcactgctcgagccgtgcagccaccagattaggtactttgaattctgttggcacaagttaggcatttggtgaggaagtgtgagcagttcaggctaatttctttggtttttccttggtaatttagcagagtttataagtcacacagcaccttaaagcagttatcaatagggccataggcaattttagcagcgcttgagcgagacaagtgtgcctgttttttctacagagtacagttgaccaaaagcgtgccagccatcatgagagcaatggctttgccggtcgcattcacctcttgccagatctcttacagcaaagccattcctcctccacttcctccacctcctcctccccatcctccagccagccgacacccaccatgtccccacagacaccccaggacaagctcactgctaatgaggtatgtctcgcaccacagctggctgctttcctggggttagaccagcactgcctaggagttagtttgcaaaggagacctttccaacaccctcaccccttcccttcccaccctgctttctctgtcacctacccttctccccaaccccaagtaacatgtttcagatctgcatataaaccccttaaccctagatcagctcccccaaacttgccagttcactgtttactgttctgtagataagtatagttgcatggctttatctagtttattttttaaaaatctaaataaaatgattgctctgtcctcagaccggtattatgtatttggcatgaaattcttatagtcatttgtggaatctgcctttttcattctttttatccaataaataaaatataggaagattcggttcagcaggcttggccttatctggacaaacttattatcctgtacaggaatctctttcaaacagaactgattttttttttttttcttgtttggggggtgggttgttggctgattactcttacttgttttcaccaaccctgttaaggagtttgttctttgacatttacaatcactcagaggtttagaagccaaattatttttgggaaacctagaaaaaattaggatgttaagcaagaaggacaaaggtttgagcttgtttttaatttaaaattttgtgtgggaaatctgtgtgctcctttgaaggcttggttgtggtgctcggtctgggtgttagctcagtctgggtgattctttgctctttgaacagggttatactccaggtgtagtgacatagcccacttgagcacccgtattgaattaaacaagtgatttgattccacagaagatttggtttaagtgtctttatctaccagttgagggaggttagaaagaatcagaaaaatcctctcctccggaggagcagtggcaagtcaactgcttcctagacaggcttggcatcggctagactggctcctgactcatgggacagggagggaagctgccaggggacagatgttcaggtgggaagcttaggggagggcatgggctctaggacatggtgaccctcaggtgtccatggagggggtccaatggtacaggacaaaagcacttgatcagacatgttccttttttctcctgaggtatatatcccacctacactcacattcttccttatatttatattttaaactttgctccatttcgctctaatgtgcagtattttactataacccttaactcactaaaccggcaaatttatttttctgtttgttttgtttttaattgtcattacatttccacttaacaatttgtttcacttcctttgtgtttttttgtcttaagttacattattaaccaaaacactagtgctcctaaaagatcaaaaagatacgccttcttttgtcatttgcacctttcactaatgagtcctcatttggtatgggtttaatggtgatgcacctaaaacaacagtagccaaagcttctgtagctttctggcaagaggctcaatttaaaataactacaattattaacaattgccaatattccagcatagattatttggactcttgggtaggagaataaattcagaagttggtgaattgagatcaagacatttcagacctcctttaggagtttcattataagtatttacttaatttttttttaaagctaggcacatgaagtctagatttcattggtagcttgcagcactgctttgtaagtgagcaatgtctctggtagagatacggctcctgcagtggttccaggtaaagctgccctgaggggtgctatgccacgtggaagctccccgcagagcattttttgggggaatgatgcaaggcaaatagagcaaagtattgggaaatagtgcaatatagaagtgaattgaaatgtgtatttttaatgttcatttttaaaatgccagttgtattaataacattgaaatttacattgcagactcagtccgctagtagcacactccagaaacacaaatcttcctcctcctttacaccttttatagaccccagattactacagatttctccatctagcggaacaacagtgacatctgtgggtaagtacagtagcaacaagaaagcagctgacaaatgggactttatctttgagttgctcttttgggtggcttaggtgtagctggttgttcacaggcacagacctcgggtacagaaacttcccatcccagttgtatgccttatttgcaatgagatgcagagtccatttcctttttccatatacattgcttacagatttcttctctttgacaaagtgttggttataccacatgaatatttacttgaagtatactggggaagggaggcaggcatagtgtgtgtgtgtacagaaaataatttcaaatatattgtgtttcagtgggattttcctgtgatgggatgagaccagaagccataaggcaagatcctacccggaaaggctcagtggtcaatgtgaatcctaccaacactaggccacagagtgacaccccggagattcgtaaatacaagaagaggtttaactctgagattctgtgtgctgccttatggggtaggtgtctagccactactccaacactttcatttttgttctgagtggtggctggtcttctagagaagtactgcattgaatagtttgtggatagacaggatggaagacttctatgatgtccatctcctgttatatgcagagtggtatattagcagactggtgtggcacatgtatatgattgcactcattttaactgtcaaatattggcatgattaatctccattttatttttattaaacaaatttttgtagtagttttgttacgtggatatattgtatagtggtgaagtctgggtttttagtgtaaccatcagcccattatactcaatagtgtacattgtacccctgaaccctgaggttgactgttctcactataaaattcaatcatatctagcagtggaaatgttggagaagtatatttataaaaacttactgcaacatgcaacccagtgtttttcatttttcatgcttgtaatttccaagtactttacagtgactattcttttgactattagcattcagtactttataaaattatacaactgtacaattatacaacttggaaatatatcatggagaagtagaagatagagtgtaagtgccacaatacctgcagcttttgtgttttgaaaagagtcttcagctttatcttgttactccctcattctttctcactgtaaaatcttgaggttgatgtttatatgttagtttttagaaacacacataataggatttcttcacaaggcccatattttgtgtagttattaccagattcttgacataggagtttaaaaaaatctacttgatactgaagattgaccaggaaaatatcaaaatattgtgtaaaatagaacctttgaaatggtatctgtctggcagcagttctatcaataaatatctgtcttttctaccaataatttctaagctgttttagatcaacttgcctagatatatgcagggaaacctaagcataatattcaaataagttccaccttgacaaggatatagtcagggcagaatggccaacctcaagaataaaattatatgaaaatgaatcacatattacatatttaaatatttttcttatactgataatctttttagttgtacagcatttttttttttttaatctctaagggttaagtcactatgcccacaagcattgcttgggtagatactgtcctccaaatgttgggataatcccaactcaatcaactctataaggaccaggcatgaacagagagagggctgtaggagcgttgttctctcaatgccgtcacaattatttatttcagattatctggaaatagggtgtgggtgggtgtgggcatacatgtatgtgccatgatattcttccgcctcactccctctacacaaatactttattccttgtcttggtgagtttatgactgaggaaatcagtacacacagatatgtgcccaattccctaggaatgtagggtcatctgtgctacatgttacaaaggtgattctgacagtgaaggttctaggtcaaggaacaagagcatttggggaaatacatgaatgatcaagagggagaagtgctttggccaaggggcaggcagtcttagatgccagtccaaggcttttggaacaatttctacatggaatgtgtagtttttgaagatagtcatgacgtgagtattttagcaagattaggattgattggatgtacatcatgagaaagtggagagaagctcctttaacaaccttaattaaggtctctatccgtcacttaaaaggttgccaaaggctgaacaattgtgagagcagaggaaagggaaaggagggacagagaaggggttttctctggctctagtggccagttttagctagtttggcagagcagcttgggagctgttgatagaagcagccaagtcgcgaggctagtttcagtagagatctgcagtgggtggaaagcaggaggcaaagtagcagcgtggaattaggagttactggttctgaggcacactcatgcacaggtgggtgggtgtcaccagatggacagcagtggaaatgtctccactgaggaagcagagggcaggtgtggaaataaggaaggaggcagcagaagagtgtggagactgtgacggtacaaggttagagaagtagggtgagtcaaatatcaaatcacaatattttgatagtcctaagaaatggaaggacaagagaactgactacagttgtttcttgatgatggtggaaagtgatctttaagaaaagcttaaatgtgagtgatggaagccgaatcataagctgttaaggatttgagggctgcatttatatggcccattccagagatttgccaatgaaagatgaggaagcacaaagagatcatggtatcagatgaaggtttgttcaaatgtgtgatgtggctaattagacatagaatctgtaaagataggaaataatcagcatataacattctcgaggaactgaggaagaactagaaactaatggattattaaggaaattgatgggatgagggtttcttgttctttcccttatcctttcttatgtttaaatatgtcagcatcattgctacatggtgatgtattgcaggattggttactttaactgtttaacctttgactattttaaggatttctgcttctgggtgaattaaggaagctacacttttttccaaatagatgatgttatcctttctatacaacctggggatttgccaagcacagcataaaattgaggcctttctgtgtccctgaaacaggagtgaatttgctagtgggtacagagagtggcctgatgctgctggacagaagtggccaagggaaggtctatcctcttatcaaccgaagacgatttcaacaaatggacgtacttgagggcttgaatgtcttggtgacaatatctggtgagtgtttgttttgtaaaccagaatatgtgacaccatcttaacaatattgtagctttacacactaaacttcagttagctcattcactgatgtactggctaaataaggtacaaccacattgagacttgacaataatgtgagctgaagacgtattcagaggtgacacacacgcccatttgatctctggctcctccgaaagcagtcttgagaagcgtatgaatgtgctctttctcactggcatctctcactgccctctctgcccagttgcttgttagatttcatttgccttgtccaatatgtaggtctgtgtccactcctttccaccagacttttttttttttttttttgagacggagtcttgctgtgtcgccaggctggagtgcagtggcgcgatcttggctcactgcgagctccgcctcccaggttcaagcaattctcctgcctcagcctcccgagtagctgggactacaggcaagtgccaccaagcccagctaatttttgtacttgcaaaaggaagtattctttgccattattgtaaaagtattgtattatggtttttattatgtgaattaacacaattatgtctcttttttacttatttatttatttatttattttttgagacggagtctcactctgtcacccaggctggagtgcaatggcacaatctccgctcactgcaagctccgtctcccaggttcacaccattctcctgcctcagcctcccgagtagctgggactacaggcacttcccaccatgcccggctgattttttgtatttttagtagagacagggtttcaccatgttagccaggatggtcttgatctcctgacctcatgatccacccaccttggcctcccagagtgctgggattataggcatgagccactgcgcccggccaattatgtctctttttaagaagagcatttttcttagtataaattgtgtaatataaactagtacaggaaaacaactacaagaaataaaaagtagaatcatccagagatcatatcttttaacttttataagtttttaaattccagttttttaagcatacaccacactcactgtatacttaagggaaaaaatctgcataaaaatggttatacaatatttcaaacataggataatggcacccaagtactaactataactagccagtttgaacagttgttgcagtacactgttgtacatacagtcagcatccctgttcctcccatatctacctgtccatggcaacctctttcctgaagttagggtgtatgccatccaggcctgattgtccaaaacacgtagtctgctttctccatgccattgaacatccttccatggcctccattttatatggctagaggatgtttccttgcatagatgtattaaaatgtatttagttatcttctcttgctgccctttaggtgtattcccttttttctctcatgtgaacatttttcacagatatccttgtagcttacttaaccttcaggcacataccatgttgcatagatcataatttcctaataattagtgttattccttggtcagatggcatgcaaaattataagactttaaatgagtcttatataccactacttacagtcacttatgatattataatcacttatgataccaccagtgatttttatttaattatctgcttgttagtacaagcttgttatgtaacatatttgcttgaagttattttacttctaatatatgctttggttgttaagtaaaggagtttcttgaaatgcaaaaatttcactatttatacttaaatgaggaaacagccatttaaaactagagtgctgatggatggtagttttttaagttggagaaaacaaatctgcatttagtgatccagtgaaacaagacagttcatggggatcaatactcagctgagaccaggtgcggtggcgtatgcctgtaatcccagcaatctgagaggccaaggcaggaggattgcttttgcctgggatatcgaggctgcagtgagctgtgatagcaccactgcactccagcctgggtgacagagtgagagcctgtctccaaaaaaaaaaaaaaaaaaaaaaaattaataattataatcagctgataccagtaatcattttttggtctacttttctgttttttttttttttccttccttattaactttcagtggttttcacaatcataaatgtagtacatgtcaattgtaggaagcttcaaaaatagaagaaacttaggaagaataaaacaaaatgtcacccccatctcagagataactcttgttaacattttatatttccctctccttttctctgtaagtatatctcacaagatggaaacaaaacattatatataaaactgtgtggtctttttcttctcttaacatatattgaatattttcctgcaaacaattccccaaaagttaaaaggattatactgaagtatgatatacagagaaagtacagataagcatacagctcaatgagctgtcacatgcagaatccatccagatagccccaccctggtgaagacatggaacattgccagcaccccaaaactgccctgtgaagccaccctgggactgcccccagaggcaagcactgtccagactttgaacatgttaggttgattttgccttcattgaactgattttatataatggtaaaacagtatgtgttctagtgtcagctgctgcttttttttttttttttttaagtagactttttctaaacgttttttcagtattttgcagtttagccattctgaaggggtgtaggaattaataggtgtatctcattttaatttgcaatttcctaatgatgtatggtacatcttttcttatgtttgtatatcttctggtgaagtatttcttctatctttaatccattttgtaattggattgttgcttgcttattgttgagttttaagagttcttcgtgtattttggatctaagtttctgatgagatatgtgttttgcggatattttctgccagtttgtggcttgtttgttcatgctgtggaatgatgtcttttgcagaagagaagtttttattttagtgaagtccaacttactagttttttctttcatgaattgtgcttctggtattgtatctaaaaagtcattgccaaatccagagtcacttggattttcttctgttaccttctagaatctgctttacagctttgtgtttcacatttaggtccacaatccattttgaattgatatttgtgaaagtttcaaagtttgtgtagatttattttcttttgcctatggatatctagttgttgcagcagcattcattaaaaagactaacctttctccattgaattgcttgtgctcctttgtagattactgctatatttgtatagttctatttttttttttttttgacacggagtctcaatctgtcatccaggctggagtgcagtggtgagatctcagctcactacaacctctgccttccgggttcaagcaattctcctgcctcagcctcccgagtagctgggattataggcatgtgccaccatgcctggctgatttttctatttttagtggagacagggtttcaccatgttggtcaggctgatctcaagctcctgacctcatgatccgcccatctctgccccataaagtactgggattacaggcgtgagccaccgcgcctggtgtatagttctatttctgggctctattttttcccatttatctatttgtctctttttgtgctaataaccacactgttttgattactgtagatttatagtaaatcttgaagtcaggtactgtcagtctttcaactttgttcttttttaatgttatgtggactgtgttgggtcttttgcctctagagtcagcttattgatatgtacaaaataacttgggattttgattagaattgcattgactctgtggatcaagttggaaagtactgatgtcttgacagtattgactgttctgtccattaacatggaaatctctctccatttatttagttcttctttgatttcatcagaatttgtagttttccttaagtaaaactagcaaagggctaattttattagatttattatacccattttgtttttttaagtactagtataaatggtgttgtagtcttaatttcaaattctaatgatttgttgctggtatacaggaaatacaggaaagtgactcacttttattttattaggcttgtatcctgcaaccttgctataattcttgctataattgcttattagttccagcagggtttttggttggttggttggttttggattttttttggttgattcttcaggattttctacctagacagtcatgtcttctgtgaagaaagacagttttatttcttcctccccagtccttgtaccttttatttcccttttttgtctaattgcattagctaggacacccaatataacatttactaggagttatgagaagggaaatccttcacttgttctctatcttatgaggaaagcatctagtttcttgccattatgtatgacgttagctgtaaggttttatggtagatgtttcttgtcaaattgaggcagttccccctctattcctatttccctgaaagtttttattataagtaggtattgggttttgtcaaatgtttttctgcatctgttgatatgatcatatgatttttcttcttagcttgttgatgtgtgtggctgacgttgccccccatcatttttgttgttgttgcttgtagctgtagtctctttgttcctttagatgactacaccacaatgtatttactcattttactatccattcagacattattgtttcctgtttggagctattaggaaccatgctgctatgaacattcctgttgttgtacttgggggcatacatatacatttatattaggagagagattaccagaccatatgtaagatatgcacatatcctactttaatagatagtgccaaacttacaaaaacagttctaacagtttacaacactagtttctgaagtttctagttgttccacatcttgcctacctttgatattgtcagtcttttgaattctagacatactgataggtgtatgaaatcatcttattactgttttaacacacgttattactggtgagaatgagcatctttttgtgtgtctgtgagatcacttcttttccaaagttccagttatagtggcacgtccagtttttctattgttatctcctgttctatttgatttataggagtttttttacatattctggattatgactcccttgtcagctgtttctgtggtacacatctccaacttgtgacttgcctttcactaggtttaagtgctggccttaagtgattgatttcttttggttactattgttattaatgatgagacctacttctggatatgcatgtaaaatatttatatttattttgctaggcaaaaaggataagttacgtgtctactatttgtcctggttaagaaataaaatacttcacaatgatccagaagttgagaagaagcagggatggacaaccgtaggggatttggaaggatgtgtacattataaagttggtaagttctagaagcgtcatattttgtttttccagagtttgattagagtttgaattttaaactttaaattttcacaggttttttgaagtttgtaataataaacttgtttctgaaacacgtggatcatttctggtgttctttctgtttccaaggcacattctaatcttgaagtctcatctagacattgtcttactccctctgtgcacctatatgcataacagagttcgtccctgcaactcactccgccctcagtctcccccacgctgtgcatcttgtgagagtctttccactcctcctctttgacagtccacattcttctcctctgtaagatgtggttcacagtaacctctttaaggaaatcttgtcagtggaagccagctgacttgagtccttttttacatgccaggcttattctccacttagaggtctggaggtccttggcaggcactgataagagtgtttgagagtttgactcaagggcttatggcctgccattttgaattaagtgcctgtgcacagctactatgctccttactagtaagtgagcccagctggccagtcagtgttttatggcaattgtattgttttttctccttggcatgaagcagtgattctcatgaagtaaaatctcacaggaacaaaaccaaaactctttttttttttgagatggagttttgctcttgttacccaggctggagcgcaatggtgcgatctcagctcactgcaacctccacctcccgggttcaagcaattctcctgcctcagcctcctgaatagttgggattacaggcaccttgccaccacgcccagctaatcaaaacaatttttttttaaacatgaaaaaaccaaaatactggcactaatgttagacatacgggagaaataatggaccttagccaaattaaagttttataggaaagatgttatagtctaacagaatttaaacaggaagtttttctatatacctaaaactgattaatgttacgggcctattgaatgtttgtttctgcttgtgtgttttcttttttctatgtttatgaaaatatatacatcatcagttcctctgttccgagggatgttgtcatgcttggcattgtcttgttggtgtagtttgtctgcacccctcagctcgtgggttaatggtgattgtgggagctgcctcagtatctctgacagttctaatgatacgggaaagtagaactatctgcttaggatagattttaggattagggttttctgtgtttatgtgaagtatttttatgtgttgaggtataactaaaatcatctaaggctaaatgtaatgaaacagctcataacagatgaaatgtacatgaatagattatcctgcagggggagcaagaggcagacgggttaaaagtctgttgggcttttccccagaacaaaacagtaggccttcaggcctgtcactcatacagaatgaatcacaagtattttcaggagataagtgtgggtaatatcattcattcgttgtcattatggttgccaccaagaatagggagctatttaaatgtatattaaattaataaaaattaaggaaaccttaaaatttagctcctcaatggcactagtacattctaagtgtgcaatagccccatgtgtgtggtggttatattagcaatacagatacggagagtttctatcatcgcagaagtctatgaaacagtaccggttttgtcagactgttataaacctttgtgtcttaatgttcgtttattgatttatttaaacagtggtaatatatagagtttaacaaggggagttatcagttaacaagttcctgctcatgcacaaagaagaaatcaagtagcggtgtgatgttagcttgtaaagaaatcatggatctgcattagtaagtcacaggtactcaaggacccctgggagtacttgttttggcagagttgcctggcagtaagggcaccaaaatagctatgggaaggaggcagttttactacttctgtagatcaggaaatggtcttagtgatacttggacttgttcacagatacttctgttggtagaattcaggactcatgaatattttagtataagccttttttcttcctcagtctgtgtgagccccatgcaggactagggaaagttgtaaggaggacctcggtctctgtgtgtttcaggagtctcttggctgattaatcatgttgttactcatttggagtaatactaagcccttgaagacttcagggtggtatacctggcattgtccttgattttaaaatatcttggaatctattataagaagattaggatcattagcgaaagtactcattgatggtcaaaatacattaaagagctggaaaaggaaactgtgaggtgtgatctctctctctgaatttttcccctgcttgtttggatgaatgaatagaaggcatatttataaagtttgcagaagacaactaaaacagtttagagggctatgttgatactgacctgtgcttctcttgcttttttatttgctgcttttcagtaaaatatgaaagaatcaaatttctggtgattgctttgaagagttctgtggaagtctatgcgtgggcaccaaagccatatcacaaatttatggcctttaaggtaacaacatcaagtgaatttaaaagtagtattggccattcaagctgcaaccaagagtcagggaatatgtttaaaaagtctgaatgttaaaattgctaatataaaagctatgtgctaatatagcatataactttatcataaaccatttctaatgtaataagcttagttaagctgctttctaagcccacagtgagaaggagagagagataaatgttgggtagacactttaatcgatgtggcaatgtgttcacagaggaaaagagaacagtacttccacccttcagttaaaaaggtgaccttcacctgagtcatggaagcgtgtaaagatttagatgtgtttttgataacaaaactgtgtctatcgggcagttttaagatatatctgttcataaaatactaattaaaaattaaattacagaaattctgatgacaacattatatactaagtgaaaaaagttaaaatatttcatatgattccatttttgtttcaataaaaaactcagctataacatctgaactaatgtacaaattaagatgtttttgccattttgcatgtatacagttttaggaaagtaaatgatggagtacttagtcttaaaattaggactgttttcatttgtgagttcacaaaaatactcatgaaatttacaaatatacctcacattgcctggtgattggctttttagaatagtttttttatattttattgaaggggtaggtttcatttatttgcaaaatttgtgtttttggattgcttactgcttgatttcccagtgaagcaggatagatggagtcacaatattcgcttaaaaaataatattcacttaaaaaataaatccaagtgttactgaataaagagaattggttatacagttatattatcttctgagatctggccttaatatcctttatataccaggtaccgtactagttggttttatacatattaccttatttaaagctgctgtttcattatcgtagtctcgtgaactgtgggtagtgatgtcagtgaaaaatggagaccaccagcacaatccaggctgttgtagcacatacagccttttcaccattttagtctagtcagaaaattagagaccttatgctactagtatgataatagtgatacaattttcagtgtgtgactcctacaactcctctcgctctactgtgcatttgaatagttgagtagcatttttaggaaagtcctcactattttactttgcatgattttctgatcaaggcagccaaaagcacagtaaatgacagagcagaaatcttgatctggaaagggagatttggaacatatcttctggaagaagtgtcttctagatgctaattaacaggcaaaaacgtaataaagactaattttgtagagtattgttgccttacggttgttgccagtgtggctcagtaattgcataactgagtatgttgggtcttctctagtttgatctattagaagtaagttctccggccgggcgtggtggctcacgcctgtaattccagcactttgggaggtcgaggtcaggagatcaagaccatcctggctaacatggtgaaaccccgtctctactaaaaatacaaaaaattagctgagtgtggtggcgggcacctgtagtcccagctactcgggaggctgaggcaggagaatggtgcgaacctgggaggcggagcttgcagtgagccgagatggcgccactgcactccagcctgggtgacagagcgagactccgtctcaaaaaaaaaaaaaaaaaaaatgttctccttcatcttctcacttctcttatggcttctttgcagtcatttggagaattggtacataagccattactggtggatctcactgttgaggaaggccagaggttgaaagtgatctatggatcctgtgctggattccatgctgttgatgtggattcaggatcagtctatgacatttatctaccaacacatgtaagaaagaacccacactctatggttggttgactggcttcattttgttttgactttcttctttactctgcttagtgaactaacacaagcagggattcatttccccttggtgtgggggtgagtatttaaatgatacgcaattttcaatagctccatgctcttagacaagtggaaatccgccttcctggctctgtggagcccttgtgaaaacctcttagctcttgctttgactaacatgggatggatttggggcagttgctgccaggccagaatatccctgggttgggagtggttctcaattggagcccagcatccaatgtttcatgggcctcaggagatatgagtcagtagagtatattactgggaaaaagcagagttggggatatatattgcatgactattctaaaatgttaatctaattgctgtatttatcttcagagatatggtaccagtgcattcactaagagtcttactgagcacttgcacagggctggaaataaccacagacgttcttccctgtactttgttcctgttctctagatccagtgtagcatcaaaccccatgcaatcatcatcctccccaatacagatggaatggagcttctggtgtgctatgaagatgagggggtttatgtaaacacatatggaaggatcaccaaggatgtagttctacagtggggagagatgcctacatcagtaggtatggagaacttggggaaaggcagcatttgtgaaaatggagccgtgtctgagactccatttatttatcatgctgattttgtatgtccttcagaccttttgactaccattgaacagagtagttggcagtagatggtggaaagttagattgtaggccgtggaaatagtcataggtctattttagaacaaaatccaagtaattattttctactttaaaaactctattatcataatctctcatttaatccttaaaacatccagaggaatatcggacatgtttttgttgaccactttgtaaagggagacagagaattggtaaagagacagagaattggtaacgaattggtaaagggagacagaaagggaagttatttgcacagaatgctagagccataactacaaacagccttgtgcatacttttctagtttgcattcagtaataaagaccgatatttgacattttcatgggtttctattccaaaactattttggttttattgtaattaggtcactgtctctgatcactcatgatttctcttccctgccgtctctcatgactggattgataaaaatctgtgcactaaactctaaactcagtgggtaatttttctagataggcgtgaaaggcctaaggaaaatgaaatagatcaaccactgatgcaagtaactacttcacaggataggcaaggtggttacaaaggcagagttccttgaaaacaaatccttaaatgctaggcatttaaattttaaattttaaaaagatttagaagtataaaaatatatttttattaagtaagcaacatcttttcagggctgtttcctcatctttaacggtttgcaatttttccctccccaaaagcatatattcgatccaatcagacaatgggctggggagagaaggccatagagatccgatctgtggaaactggtcacttggatggtgtgttcatgcacaaaagggctcaaagactaaaattcttgtgtgaacgcaatgacaaggtaatagttcccttatggattctttttagttgctctatcttttaataatggcttgttttccatggagtttgatgattaatttccttggagttttgataaaaataatcaaggaactttttaaacgttgctttttagtcatgtttgtgaggattggggaatgttttgctttttgctatgaggggatagagatatttttctctgtagaaattaacatatttgggttttgctttgtatatgtatttttaactctattagatgaccagtctaggctataattagagatagggaagataaaagctgccagttcagttggctggaattcttttgtgagtggaaggaaccgccgtgccatttgggtacatcaaaaggttcctctgacctaatgtgtgtcaagaagatgccccttgttagtctgtgagtggtgaaattgcttcctaggtttgcatgacagaaatgttgcacagtaaaaatcatcttatgcagacataacatacctcctgcaccagagaccccatggcatgacaccccctttgcttttcaaaactggccatatcactccagggacgattcctgtggcaccttcctcccaggaagtcccttttaaactggctttggagttgagcagatagatggccaggggcgttgacccatccctgtttgccaagggagaaggcatcgagggtggaactgatttttactaagcctaccctttctttcttctgcccagtcagacaaaggcatgtctgactacctaaggcaagacaccacgacctttgaaacttggccctgaagaacgtttccaccttttgcgtcacattgacagactagcagtcagcccagttctcagatttaaacatttagtcatttaatgcaagaaagaagaagctacacatatgtccttggcagctggtcctgcttgcccgatacatcccaaacacaaagtcacttcacctctacccactgtcttctgcaaccctacaactcagtttcaagtggagttttgcctacagattatctcccaaatctgtgaccttgaaaatctctacagctcagacctaatccaggattttgtcagcttgttggcttatactttcctaagtatgtttaccatagctgcaactatagcattctttgaatttcaggcatttaaatatttttatcatgcatgtcatgtcctttaagatttattaataaatggcacaaaaattctatttatgggttatatgaagtaattaatacattttttgttgatttttaaaaagaaattaggttgttaaggagtcttccgtgatgctcattgtgttttttaaagacatttatttattagaaggtgttaacagtagaagtggaaagaaataacttcagaaacatccatttttttcctttgttgtctcacaatatgccaacgtgtaaggagttagtagtaacaagcctgagttgtaataaaaattggctgcagatggtcactccttacaaattataaattgataattgccccagaggtttttgtgggttgtttttgtttgtttgtttgttttggtgacggagtcttgctctgtcgcccaggatggagtgcagtggcgtgatctcggctcactgcaacctgaacctcctgggtgcaagcaattctcttcctcagcctcctgagtagctgggattacaggagcccaccaccatgcccagctaattttttgtgtttttagtagagatgcggtttcactatcttggccaggctggtcttgaactcctgacctcatggtccgcctacgtcggcctcccaaagtgctgggattacaggcatgagccaccatgcccagcctttttatttatttatttattttttgagacagagtcttgctctgttgcccaggctggaatgcagtggtgtgaccttggctcactgcagcctccacctcccgggttcaagtgattctcatgcctcagcctcctgagtagctgggattacaggtgtgtgccaccacatggtatttttagtagagatgggttttgtcatgttggccagactggtctggaactcctggcctcccaaagtgctgggattacaggtgtgagccactgcacctggcctcagagtttcttttgaaaaggctctttgggagtctaagcttctcgtacttgacagtgttgaggatgatggtggcttagattccctggctggaagtgcttcatgaccatggtaaccattccctctcttttcttgcttttgcaggtgttctttgcctctgttcggtctggtggcagcagtcaggtttatttcatgaccttaggcaggacttctcttctgagctggtagaagcagtgtgatccagggattactggcctccagagtcttcaagatcctgagaacttggaattccttgtaactggagctcggagctgcaccgagggcaaccaggacagctgtgtgtgcagacctcatgtgttgggttctctcccctccttcctgttcctcttatataccagtttatccccattctttttttttttcttactccaaaataaatcaaggctgcaatgcagctggtgctgttcagattctaccatcaggtgctataagtgtttgggattgagcatcatactggaaagcaaacacctttcctccagctccagaattccttgtctctgaatgactctgtcttgtgggtgtctgacagtggcgacgatgaacatgccgttggttttattggcagtgggcacaaggaggtgagaagtggtggtaaaaggagcggagtgctgaagcagagagcagatttaatatagtaacattaacagtgtatttaattgacatttcttttttgtaatgtgacgatatgtggacaaagaagaagatgcaggtttaagaagttaatatttataaaatgtgaaagacacagttactaggataacttttttgtgggtggggcttgggagatggggtggggtgggttaaggggtcccattttgtttctttggatttggggtgggggtcctggccaagaactcagtcatttttctgtgtaccaggttgcctaaatcatgtgcagatggttctaaaaaaaaaaaaaaaaaaaaaaaaaaaaggaaaaaaaaaaagaaaaagaaaacgtgtgcattttgtataatggccagaactttgtcgtgtgacagtattagcactgcctcagttaaaggtttaatttttgtttaaacctagacgtgcaacaaaagttttaccacagtctgcacttgcagaagaaagaaaaaaattcaaaccacatgtttattttttttttgcctacctcattgttcttaatgcattgagaggtgatttagtttatatgtttttggaagaaaccattaatgtttaatttaatcttaataccaaaacgaccagattgaagtttgacttttattgtcacaaatcagcaggcacaagaactgtccatgaagatgggaaatagccttaaggctgatgcagtttacttacaagtttagaaaccagaatgctttgtttttaccagattcaccattagaggttgatggggcaactgcagcccatgacacaagatctcattgttctcgatgtagaggggttggtagcagacaggtggttacattagaatagtcacacaaactgttcagtgttgcaggaaccttttcttgggggtgggggagtttcccttttctaaaaatgcaatgcactaaaactattttaagaatgtagttaattctgcttattcataaagtgggcatcttctgtgttttaggtgtaatatcgaagtcctggcttttctcgttttctcacttgctctcttgttctctgtttttttaaaccaattttactttatgaatatattcatgacatttgtaataaatgtcttgagaaagaatttgtttcatggcttcatggtcatcactcaagctcccgtaaggatattaccgtctcaggaaaggatcaggactccatgtcacagtcctgccatcttactttcctcttgtcgagttctgagtggaaataactgcattatggctgctttaacctcagtcatcaaaagaaacttgctgttttttaggcttgatctttttcctttgtggttaattttcctgtatattgtgaaaatgggggattttccctctgctcccacccacctaaacacagcagccatttgtacctgtttgcttcccatcccacttggcacccactctgacctcttgtcagtttcctgttcctggttccatctttttgaaaaaggccctcctttgagctacaaacatctggtaagacaagtacatccactcatgaatgcagacacagcagctggtggttttgtgtatacctgtaaagacaagctgagaagcttactttttggggaagtaaaagaagatggaaatggatgtttcatttgtatgagtttggagcagtgctgaaggccaaagccgcctactggtttgtagttaacctagagaaggttgaaaaattaatcctacctttaaagggatttgaggtaggctggattccatcgccacaggactttagttagaattaaattcctgcttgtaatttatatccatgtttaggcttttcataagatgaaacatgccacagtgaacacactcgtgtacatatcaagagaagaaggaaaggcacaggtggagaacagtaaaaggtgggcagatgtctttgaagaaatgctcaatgtctgatgctaagtgggagaaggcagagaacaaaggatgtggcataatggtcttaacattatccaaagacttgaagctccatgtctgtaagtcaaatgttacacaaaaaaaaatgcaaatggtgtttcattggaattaccaagtgcttagaacttgctggctttcccataggtggtaaaggggtctgagctcacaccgagttgtgcttggcttgcttgtgcagctccaggcacccggtgggcactctggtggtgtttgtggtgaactgaattgaatccattgttgggcttaagttactgaaattggaacaccctttgtccttctcggcgggggcttcctggtctgtgctttacttggcttttttccttcccgtcttagcctcacccccttgtcaaccagattgagttgctatagcttgatgcagggacccagtgaagtttctccgttaaagattgggagtcgtcgaaatgtttagattcttttaggaaaggaattattttccccccttttacagggtagtaacttctccacagaagtgccaatatggcaaaattacacaagaaaacagtattgcaatgacaccattacataaggaacattgaactgttagaggagtgctcttccaaacaaaacaaaaatgtctctaggtttagtcagagctttcacaagtaataacctttctgtattaaaatcagagtaaccctttctgtattgagtgcagtgttttttactcttttctcatgcacatgttacgttggagaaaatgtttacaaaaatggttttgttacactaatgcgcaccacatatttatggtttattttaagtgactttttatgggttatttaggttttcgtcttagttgtagcacacttaccctaattttgccaattattaatttgctaaatagtaatacaaatgacaaactgcattaaatttactaattataaaagctgcaaagcagactggtggcaagtacacagcccttttttttgcagtgctaacttgtctactgtgtattatgaaaattactgttgtccccccacccttttttccttaaataaagtaaaaatgacacctattttatgtggcatgagtttcgaatatgttctgacccttcagaatgtttccttcctgtgaggatccatattttatgcatacctgcctaccctgagcttcccgtaccagagcaggctcctgtattttgctatttcagatgacaggggcttgcccaaggccaggtatagattacaaaagtagcaaatgtttgtctaaagacctcagagatgaagtgggagatgaacctccatcaccaggttcctgaagacagtatggagtaaagctggtccttaaagaaatgtcacatttttgcagttttgaatttggatcaaaaaatacaacagcatgatgtctgtaataggtcaattaaagtagctctttctcagtttggtgcataaatactaacttgggtttaataattggagccccttcaatgtaaggtcattgtgtcttcagcgctggggttccccatcaacccccccataggcctggtaggcatgatcgccgtcgggcaaatctggggccatgctctcagtgttggcacctcgccttagtctccagggctgcccgtgctgcatcatcatcaattaggcatattaataaaccacttcgtgtttcatcctagaaacatgctattctctctaaagggaaaatataactccttaggctgtcagatgagtaagtttttttttttcctacttggtgtgttgcagttggtggatgattatgaataaaaatctggtggagttttcttgggaccatcatgcaatc

SEQ ID NO: 1577 - DNA, 654 bp, Homo sapiens
aattcttcctgaaacagtctcatctttgcctctgtcctgcccagcttctttgctgttatcttgttcactatttcctaagggatacatagcctgcatattagccgagattgtttctcaaatttaaccacttattaaatttaaactctgctcctcctgaactaccaaacatgctggcacagagcaagcactcagagtccctggctgtttgcttaagtagcatgaaataactcctatgttaatccaagggaaaaccagcctgcctgtgcagtgtgggacgggcaaggaagtgctctggtcttcctcttcttccaggtcttccttccaggaagtgctggggaagtgtagtcccaggagggctgcagagctccattgcactgggcatgggccatcctgtcccataacaggttcctagtacttaccagtccctccagctggagcttgggtgctggaataacactgcaaggactcttgatttctgagaccaatctagtttgcttgtttctaagaaatttggattagatattccagcacaaagtgacttttaaaaaatactcatttctattttggccaaaagtgtaaaattcaggcaagttactcaccagagttctgtggagggatgcggacagagctgaccaaggccattctgctcttacc

SEQ ID NO: 1578 - DNA, 511 bp, Homo sapiens
ataaataaagatggcatagccattaaagttgtagtttttagatactagagcaggagcatcattcattttatgaccccatctccacccatgggaagctgatgagttttgtgtattgaattcgaagagcagagaatgggggaaaaggagattcccccattgaaaacctagataatgagagaggcggaaccaaaagcagactcagaacttcactgagaataatgggggtgtagtagtcaggtgagagagactggactaccaaatcatcgttgctatccagttattccagatgaaagatactactttacatttcttagggcatcatttttaagtgttggctttcagattaaatactagttgagagtggtgggaagacccagaaggaatacttaaactataataaatatgtactttgtgtatccattataaatatgtctaacatccctgatagctttaccctaagctttcttgtttaatggttaattttagtgtcacaaataaagtttgtgttaat

SEQ ID NO: 1579 - DNA, 3018 bp, Homo sapiens
aagagaaaggggtgctccaccactccctcccatcccgaggtgatctttgcctgctcttctctacccaagctcaagagctgcttctgttgctatctaagaactgcataccctcctccctgcttcttcccttgtgcctcatgtatgggcaggaggaaaggtgggagggggagtgggaatatgcgtgtgtgggtgggaatcggtaagaaatgcacctagcttttcatattgtgtttattctccaggctattgcttgcttcagctgcagcctgcctgtgctggctgctggggtcgataggcttttgtcgtaataggcagagatgacttgcatcccagctttccaccaaccaaattcaaacattcactgcttatttgttacagactgtaattattaaagtccctgagagctgttttctcccgttcctttttcgcatgcttggcctcctctctgtttctatgaaccacagaccacctaagcaagctgctgagtaagggctcactggaaacttgcagtcacaggatgtccaatctttggcagtccgagcttggctctaggacagagctgtccaatagaaatataatgtgagccccatatacaatttttacatttctaatatattttaaacaagtgaagttaatatgcatccaaaatatttcaacctgtaatcaacataaaattttaatgagatattttatattattttttggtactgaatcttcaaaatccagagtgtattttacacttaccgcacatctccattcagactagtcacatttttaagtgctcagtagccacatgtggctggtggctactggattagacagcacgagtctggaagatggaagctagtgcagaaacctcttgtttaaaaaacaaaaaaggcaagatgggcttgagcgattcaagaggcaactaaaaataaaattaggacccagcaccttgtttgacacacagtttgaccttcgattttcctcccttaacttccctcttcccttaatatctgtatacaagtgttgcttcaaagtaccaaggtcagaaattgattgagtacggtttactaaagtcatgtggaataaagccattggaaacaaatggaaagcctgtcgggacttctgggctcagaaccagctggctcacgcactccacttgtcagctggacttctgccttgtgaaatggaagcagcctttgttcctttctggctgagcaagctcctgaggctgggagagactaggaaggcttggtaggaggggaaaaaagtcaggaaaatatatcaaatcagaaacatggaagaagaagggaaccgatttgagttggtgggcaaaactctaaaaatctaaatctgatgcttatgtaagggttgagcgaattagggagattgctagtggaaattggagggaatttgttttgcatcatttgtctaggatctatgcaaatatagctccactaaaggaccatagggaagagccagccttgccttttcttatatgattttgtttacaaaattttactgggacttttaaatctagctatagagttgggaaaaaatatttccacttagatattttacatggttttgtttaaaattaccattacttgttttttaaaaacacatgaccacatatgtatatgtatatctacctaaacattgtatcatggtttcagtatgttattcatgtattactgggagatgctaccaagaaaccaacccaaagaaaattctgaaaaatacatttctatttatagaataaatgtttcatttatataaaagcaaaagaacttagagttctaataaatgggatgtctaataaattatgaagttactgatttgaatatattatatttctataacttccttgccaaagtcctgatttagtacattagagaacctgtgtttcctctctcctctaccattcatctctcttccatacagtcatttgggctttttactcaaagagaatcaagaaataataaggtataacaagcttggcaaagtgttggctttttaaaaaaaaatttttttaatctctagcagtttggtaatttagcagcatcatttatttgggattcttttatctgatttcaacagtgaaaaacatccctatgataaagcctaatgacccatttcacaaaagatggaatttgcccttcctagaaaatatgacggagaaaagtctgactcagagaaagtgggtctgaattttataaggggtagtaagaattggacaattcctttgcatatctgaacttggcaggtaccgttctaaatctgaaacagggtgatagctcaaagttgccattcatccagaatagattgttttagaatgtagtgtttaagtgactgtttcattaatacacctacaccctttctttgaaagtttgcaacctaattgcatctaaaactatgaataagttctgtggtaaaatcttaaactatggaaaattacaaaaatgaatttttcttccctgaaatcagagcttacatgtgtgtttttttataacattttcagataaatgtattcaacatgtaatacagtattttaacattcacctcttattttatattgaaatgtattacagtattaaaactcagtgttcagtatttatttcactatgcattttatttagtaaaagccaggagaaatgtttaatccaatggtgccttactttgtgatttaaaagaaatcaacttttttttatgtctaagtagtagattatttgcatatttgtaaaaactgttaggtctttatattttaaagtgtaataccagttttgttattttagtagcagaaatgggatgattgttaaagttccccaaaaatgttggcatgaaattaatttttccctccttatagtcaaggaccgtagaggaagaaaaacttttttttcataccatgcactatgtaaacagacacattttgctatctgtgtcatcaggatagtgtaagtggtagggtagagactaccctagacatctgcatctttgtaagttagccagacaataaagaaaagcagaatgata

SEQ ID NO: 1580 - DNA, 138 bp, Homo sapiens
agatatacctaatgctagatgacgagttagtgggtgcagcacaccagcatggcacatgtatacatatgtaactaacctgcacattgtgcacatgtaccctaaaacttaaagtataataataataaataaataaataaa

SEQ ID NO: 1581 - DNA, 299 bp, Homo sapiens
tgactaggtagactgtagtgtagtcatattttggaatgcagactgtcattaataatctttgcaaagagtaatgccttcgaaagatgttcaaactgactatatgatcttatttctggaagaaaacggggaactgtttctaagtaaaaaatatacacataattggttatctctgggtgctggaggaatgggtgagttctttgtttttactcatccatattttctaaatctataataagcacacactgtgataagaagaaaatgattttttttaactttgtgcaagtacttgggagccagtg

SEQ ID NO: 1582 - DNA, 1052 bp, Homo sapiens
ggacattgcccccccgcctgctgaggctgttccttcctgctgcacttgagcagcctcatcttccttcatctcctctcatgttcacttctctttgcctggaccaatggggaaaaaagtgcacagaatgagattatgtgactacagcaattctgagttagctttgattgctctgcagtaaaattaagggaccatatctttctcatgcacatgatatatagtttcaaatatagatctgtacatacgtgatgatgaaaagttcttcaggatgaggatgtatcagagagtgtgaattgaggccagtcttctgtttcctcccaaactcttaacagattgcatatcttcatgcaaatcttttcatgtattccttgtatactacctatagaaaggtgggacttgggagggtcacttacaactcctgtgatcttattttctcctccaggggctccttgaatagagttttcccccattttactggccaaggctgcagttagagctgtggtttgtcctgcaggggatatttgtcagtgtctggagaaatttaggttaacgcgactggagaagtgctattggcatctagtgagtggaggccagggatgctgctaaacaccccgcggtacacagcagaccaaagaatgatctagccccagataccagtagtgctgaggttggaaaactcttaagttagtaaatatacaactgataggaaaaacatgaagtttcaataattaaaaagctttgcacgaaagtttattacagggctgggcatggtggcttaggcctgtaaatcccagcactttggggggccgaggtgagaggatcacttgagcttaggaatttgagacctgtgttggcaacatagtgagaccccatctctaatatatatatatctgggcatggtgtctcctgcctgtagtcccagctacttgggagggttgaagtgggagaatggcttgagtccaggaggttgaggctgcagtgagccatgattgcatcactgtactccagcctgggcgacagagcaagaccctgtctccaaaaaaaaaaaaaaaaaa

SEQ ID NO: 1583 - DNA, 431 bp, Homo sapiens
ctgtgaattgacacatatagcttcctctactgtaaaggttgatgtggctaatgagaaatatttccacatcttctcctttatttcaaggagataggctgtggaagtcagacgtctctaagccccaagctgttttatgtagcctgttgttagtatgtggaagctgaaattcttacagagttactctagaattgaaaaatctatctggaagtttggggagtactcatagtgcactaattattacaaattttcattatcttacttggattaaaaattattagagagccatttgtcatactgcttagattacaaacaattatagagttctagagtgcattataagctcataggaaatggaactttgtatttggtggcaaacctttattctttaggtagatatttgaggtggctcagcagatttatatgttgcggta

SEQ ID NO: 1584 - DNA, 1532 bp, Homo sapiens
cttgtgttgatttttgtataaagtaagagataaggatccagtttcattcttctacatgtggcttgccagttttcctagcaccatttattgaatagggtgtcctttccccactgtatgtttttgtatgctttgtcaaagatcagttggctataagtatttggctttatttctgggttgtctgttctgttccattggtctatgtacctgttgttatactagccccatgctattttggtaactatagcattgtagtatattttgaagttgaataatgtgatgcccccagatttgttctttttgcttagtactgctttggctatttgggctcttttttggtgccatatggattttaggattgtttctgattgacaaaggtattttgatgggagttctgtgaagagtgatggtggtatcttgataagaactgcattgaatctgtagcttgctttaggcagtatggtcattttcacaatattgattctacccatccatgagcatgggatatgtttccatttgtttgtgtcatctatgatttctttcaatagtgttttatagtttttcttgtagagctattttacctccttggttaagtataaccataagtattttattttattttttttgcagctgttataaaaggaatggaattgttgatttgattcttagcttggccgttgttggtgtatagcagtgctactgatttgtgtacattgattttctatctggagaatttactgaattcatttattagatctaagagctttttggatgagtctttagagttttctaggtaaatggtcatatcattggtggacagtgacagtttgacctccttttttccaatttggatgccctttcttttctgtctgattgctgtggctaggacttccattactatgttgaatagaagtggtgaaagtgggtaaccttgtcttgttccagttttcaggggcgtaggcaaagaattcatgactaagaacccaaaagcaaatgcaacaaaaacaaaaataaataaacgggacctaattaaactaaaaagcttctgcacagcaaaagaaataaccagcagagtaaacagacaacccacagagtgggagaaaattttcgcaaaccacacatccggcaaaggactaacatccagaatctacgaggaacctcaaacaaatcagcaagcaaaaaacaaataatcccatcaagaagtaggcaaagaacatgaatagacaattctcaaaagaagacatacaaacaactagcaaacatatgaaaaaatgctcaccattattaattatcaaggacatgcaaattaaaaccacaatgaggtatcaccttacttagtgagaatggccataattaaaaagtcaaaaaataatagacgttggcatggatttggtgaaaagggagcacttttacactgctggtaggaatgtaaactaatacaaccactgtagaaacagtatagagattccttaaagaattaaaagtagaactacctttcaatccagcaatcccactgtcaggtatctacccaaaga

SEQ ID NO: 1585 - DNA, 409 bp, Homo sapiens
tgaaaaagagttaagaaagcctaaagtactaatgacacaccgtcaagtggaccaaatacataatatgcgagtccaagaaagagaagagagagagaaagaaacagaaagtgtatttaaagagataatggccccaaacttgccaaaacagaggaaggagatggacatccagatttaagaagtcttccacataggaggacttcagagatgtccttaccaagacacatgataatcagattatcagaagtaagagttaattttgaaagcagcaagagaaaagtgtctggtcacagaagaaagcccccacaaaatgatcagatttttcaccagaaagcttgcaggtcagaaaattggatgataaattcagaatggtaaaaacaaaaccaaataaaacaaacaaataaaaatgcct

SEQ ID NO: 1586 - DNA, 319 bp, Homo sapiens
aaagaagccattatgtgaacaagacacatgcacacacatagttatagtaacacaatttgcaattgcaaaaatatgaaaccaacataaatgcccatcaaccaacaagtggaaaaagtcctatatatatacaccatggaatactactgagccataaaacaaaatgaaataatggcctttgagcaacttggatggagctaaaggccattactctaagttaaataactcaggaatggaaaaccagattattgtatgttctcacttataagtgggagctaagatatgagaatgcaaagacataagaattatataatggggccgg

SEQ ID NO: 1587 - DNA, 5062 bp, Homo sapiens
cgagattactgaattttacaagcttgacattttctattggctttataagctcttctcatgtttttattaccctcacatccaatccgttcgagctacacgctaaatcaaattggtattttatatttttatttttttagaggcaggatctcgctctgtcacccaggcaggagtgcagtggcacagtcatggctcgctgcagccttgacctcgcctcagcctccccagtagctgggaccacaggctcatgccacgcacgcccggctgaagctagttttaactgaagaaaactcaaagtgttctctcgccgttaacctttattattgaggcattggctctgctataggaaaacgaggtgacgttaatgtcggtggttgacattaaccactggcaagtgacagtgtggctccttgacaagtggttgctgctcataaatgtcatgaaacaaaaacactgattttagagaagtgggattctacagttaatatcgccagcaaacttttattaagctctcactctgtgccaaacacatgcttgaagttggggtgaatctgtgaccattaagatgttggctgttcatgggcacgttatcaagcaactggggtgtgagagcgaatgataagagggtgaatctggatgaggagggacttccagggcacaggtggaggagaggcattgcagccatagagaggcccaagggaacagtcaagacaaggcggggacagtggccaggaggcgagggcagcacttcctgggcagggaaggcttgccagggagaccagactcctgtctctgtttggaaagaaaaggaaccgcactgggggtcagggaggctaggcacggcaccagcctgggatgccagtcccgcctgaggggccaaggcaaaggggaagcattcacagaccccacaccaggctctgacgccaagtggaagaagagggagatagaagcagaagcctgggcttccaggcctggttcctgggcgggtgttgatgggacccagggagagtcctgtggggatactttgggtctgggctggcaggggctctggaaggagaggcatggaggtgcgaacctggtgcccaggtggaggtgcagtgggggtaaggtggccaggctgcagacccctgcatcagaatgcctgcgaagctgtgggttttttgtttgtttgtttgttttatttcgagacagggtgtcactctgtcgcccagactggagtgcagtagcgccgtctcggctcactgcaagctccgcctcccaggatcaagtgattctcctgcctcagcctcccgagtagctggatttacagatgcatgccaccacgcccagctaattttttgtatttttagtagaaacgaggtttcaccacgttggccaggctggtctcaaactcctgacctcaaatgatccacctgcctcgtcctcccaagtgctggaattacaggtgtgagccgcaccagcctgttttttaattttatttagagacagggtctcactctgttgcccagactggagtgcagtggtgtaatcttggctcactgcagcctcaacttccagcgctaaagcaatcctcccacctctgcctcccgagtaactgggactacacacgcatgccactacacccaggtaatttttaaaaattttttttagagacagagcttctccatgttgcccaggctagcctcaaactcctgggctccagtgaccctcccgccttagtgtctcaaagtgctgggattacaggtatgagccaccacgcccggtcagaagctgtgtttttaagtggacataccatcttgtcctgctgaagtatctccatgtaatcacaatatctatgtcacccaaatctcctccttcctcctccctcccccaaaacacccccacaggcatgcataccctcccatgcgctggaggcagaatctcccaaggggagctggccaggagaggtgtccctgagttcagatggaggtggaagccagagtggggctgggaccacccagtgacatgaggatggggcttgggataaagccctggggacactgacatttaaagtgtggacagaaggagctactgaaggcaatggatttagaaaagcaattgagtatgatttccttcttcaagaaaggctgtccaactagctctcacttcctctcgtgtgttcagtgtcacccggaagcagagtttaatgtgactaaagtcaacattggctcacactgtcagggagtgtgggaagatgagtaaggactcatcgcagggcgatacccacagcttaaaataggcaccttcccctcccaggtctggttagggcagttgttacatatgaggggcgtggagttttgtcttgtattttggccttgttggtaaagcattccaaagcttcgacacaccctcctttcagcccattaggaaaggctgttgattgtaatattcacacagctccctgggctatggttaagagccttgcagaaggactgggagaagccctgtgtgtttgaagtattgtagcatcagaaaaaaacaccggaagaaggcaggtggggacaaggtgcctatgtctgctccttggaattcctttccttactgtccgaggcaactacagggaaagcaaagcgtgagcccccaaatccacacctgggaggaacgttcccctttgcaaggcatgggactggctggccctgtgtctcacgggggctctgagttttgaggtcacactagcctcctgaggcctggctgagagggctgggttgggggtcaggaggccccctgtagccacgaagctcctctggggcattgttaaaggttcaccctcttttttgtgggtatcctggaagatctcaagaaactgagcttggaagaagagaggctgagagggtctcccgccgcctgcgttctctgcagctatggccccacagcctccagtgaccatggaggggaaggtgccacccgccttggctgctgaaagggtgatgctcttatgcctgagtcttggctcctgtggtcctgcagagaccctgtgggggccgcccggtcgtcacctgcactcatcttgggttttccttccttttccaccctaagctgaaggtatttttttcctgttttcttcactctaacttggggaagaaggaagatcctttatggaaaagaaaaaaaaaaaagcacctttgaacgtcctgcaacttgagtttcaagctttcagaaggattcggtgctgctggcctgctcagacctccgcctgggctgtggagttcctcctgttggcccctcctctctgtaccacaaaagctctaggcggcccagccacccctgtgaaagcggcgcccgtagccagacgccaaggctgccgtcccgagccgagggtggcaccttgcccagcgcacgtgcattctcctgtgggaactcggagggcatgtggtgagcagtctcctgtcagttgaggtggaggctcccggcccatctttgctctcctcaggctgcccagctcctggcggcacatggtggcctggcaaagctgacttggcctcctcagttccccacccatccgcggatcatcgccttccctagccacctctctctatagccaccgacatctgcggagcgtcacagactggttctgagctgtggtttacaaattcaacccaacacagagtgaattcaaatttgcttttggaacagcctttatctccaattaagtgcaagtatatttacactatgtgatattaaaggacttctccaatgactgggaggtactgaaccaagatgtttgtaaagaaacggtggggtgaggtggttaggtagaatataccgtcctggccatttctcttccttcaggcgagtaagcgctccttcagcagaaaggctgcggattgctggctgtgctctgtggactgggccagtaggtgtggcccaggtccaggtcctggcacctctgctgagtgcccagcctgagatgacacatgccatcctggagagaagcagagagggtgctgtctccaggcgttctccagacagcctgggcctggcttgctgagccagctgcaggaggggatctcctgactggggcttgggaccagatctgctgcagagaggcaataactctgtctaaaaagaaaacttgtcccgtgtgattacaaaaacaggaaaaggctccaagctaggaaatgagatttgaggtatggagaacattctcacctgatggaagcatcctgttcctgtacaggaggaggagctggtgcaagccctaggccacatatgtcacagttgttttggaccctccgtagcttttatactcataaaatattaaagttgcccctttcatatttgggtcattgaaagagcccaccgtactctaggttcctgctcactatgcacaacatctcagaagatggcgtacaaaactatttttctaactatagcacaggtaatgtgggggtggggaggcttgggatatacctaaatgtggcaaatgatttatcttccaccttgagggatgaaaaggaaactatgcacttgaattttaattaaaattttaatttaattcattggatagcttgtgccagaaagaacagtcaatattcaagaagcaaaactgacgattagctcagtttcgggcctccctgtcgggggagttttcttgtctggaacacaaacacctacaagtagagtgtgagctggttcttgacaatcagatctcatcaaccctttgaaatgttctgggcagcacagctccttggtctgcatggttggtgtaagtataatcaagtagtgaaattgtatggtatatacctatatgccaacagtgtacacccgtatgtgcagaatttgctaatataaccatttcaataaaaacctattgaaaaagctgatttgaccacatggagtattgttggtggtgacgtgtatcactgaggactctcttggttacaaatgacagaaaacccagccaaaactggctaacacaaaaggggaatgtcatggctcccaaaagccaaaatgcccaggggtgcctatgtcaggcttggtgtgatttcaccctcaaatgctgacaccaagacacatgccaactttg

SEQ ID NO: 1588 - DNA, 5061 bp, Homo sapiens
cgagattactgaattttacaagcttgacattttctattggctttataagctcttctcatgtttttattaccctcacatccaatccgttcgagctacacgctaaatcaaattggtattttatatttttatttttttagaggcaggatctcgctctgtcacccaggcaggagtgcagtggcacagtcatggctcgctgcagccttgacctcgcctcagcctccccagtagctgggaccacaggctcatgccacgcacgcccggctgaagctagttttaactgaagaaaactcaaagtgttctctcgccgttaacctttattattgaggcattggctctgctataggaaaacgaggtgacgttaatgtcggtggttgacattaaccactggcaagtgacagtgtggctccttgacaagtggttgctgctcataaatgtcatgaaacaaaaacactgattttagagaagtgggattctacagttaatatcgccagcaaacttttattaagctctcactctgtgcccaaacatgcttgaagttggggtgaatctgtgaccattaagatgttggctgttcatgggcacgttatcaagcaactggggtgtgagagcgaatgataagagggtgaatctggatgaggagggacttccagggcacaggtggaggagaggcattgcagccatagagaggcccaagggaacagtcaagacaaggcggggacagtggccaggaggcgagggcagcacttcctgggcagggaaggcttgccagggagaccagactcctgtctctgtttggaaagaaaaggaaccgcactgggggtcagggaggctaggcacggcaccagcctgggatgccagtcccgcctgaggggccaaggcaaaggggaagcattcacagaccccacaccaggctctgacgccaagtggaagaagagggagatagaagcagaagcctgggcttccaggcctggttcctgggcgggtgttgatgggacccagggagagtcctgtggggatactttgggtctgggctggcaggggctctggaaggagaggcatggaggtgcgaacctggtgcccaggtggaggtgcagtgggggtaaggtggccaggctgcagacccctgcatcagaatgcctgcgaagctgtgggtttattgtttgtttgtttgttttatttcgagacagggtgtcactctgtcgcccagactggagtgcagtagcgccgtctcggctcactgcaagctccgcctcccaggatcaagtgattctcctgcctcagcctcccgagtagctggatttacagatgcatgccaccacgcccagctaattttttgtatttttagtagaaacgaggtttcaccacgttggccaggctggtctcaaactcctgacctcaaatgatccacctgcctcgtcctcccaagtgctggaattacaggtgtgagccgcaccagcctgttttttaattttatttagagacagggtctcactctgttgcccagactggagtgcagtggtgtaatcttggctcactgcagcctcaacttccagcgctaaagcaatcctcccacctctgcctcccgagtaactgggactacacacgcatgccactacacccaggtaatttttaaaaattttttttagagacagagcttctccatgttgcccaggctagcctcaaactcctgggctccagtgaccctcccgccttagtgtctcaaagtgctgggattacaggtatgagccaccacgcccggtcagaagctgtgtttttaagtggacataccatcttgtcctgctgaagtatctccatgtaatcacaatatctatgtcacccaaatctcctccttcctcctccctcccccaaaacacccccacaggcatgcataccctcccatgcgctggaggcagaatctcccaaggggagctggccaggagaggtgtccctgagttcagatggaggtggaagccagagtggggctgggaccacccagtgacatgaggatggggcttgggataaagccctggggacactgacatttaaagtgtggacagaaggagctactgaaggcaatggatttagaaaagcaattgagtatgatttccttcttcaagaaaggctgtccaactagctctcacttcctctcgtgtgttcagtgtcacccggaagcagagtttaatgtgactaaagtcaacattggctcacactgtcagggagtgtgggaagatgagtaaggactcatcgcagggcgatacccacagcttaaaataggcaccttcccctcccaggtctggttagggcagttgttacatatgaggggcgtggagttttgtcttgtattttggccttgttggtaaagcattccaaagcttcgacacaccctcctttcagcccattaggaaaggctgttgattgtaatattcacacagctccctgggctatggttaagagccttgcagaaggactgggagaagccctgtgtgtttgaagtattgtagcatcagaaaaaaacaccggaagaaggcaggtggggacaaggtgcctatgtctgctccttggaattcctttccttactgtccgaggcaactacagggaaagcaaagcgtgagcccccaaatccacacctgggaggaacgttcccctttgcaaggcatgggactggctggccctgtgtctcacgggggctctgagttttgaggtcacactagcctcctgaggcctggctgagagggctgggttgggggtcaggaggccccctgtagccacgaagctcctctggggcattgttaaaggttcaccctcttttttgtgggtatcctggaagatctcaagaaactgagcttggaagaagagaggctgagagggtctcccgccgcctgcgttctctgcagctatggccccacagcctccagtgaccatggaggggaaggtgccacccgccttggctgctgaaagggtgatgctcttatgcctgagtcttggctcctgtggtcctgcagagaccctgtgggggccgcccggtcgtcacctgcactcatcttgggttttccttccttttccaccctaagctgaaggtatttttttcctgttttcttcactctaacttggggaagaaggaagatcctttatggaaaagaaaaaaaaaaaagcacctttgaacgtcctgcaacttgagtttcaagctttcagaaggattcggtgctgctggcctgctcagacctccgcctgggctgtggagttcctcctgttggcccctcctctctgtaccacaaaagctctaggcggcccagccacccctgtgaaagcggcgcccgtagccagacgccaaggctgccgtcccgagccgagggtggcaccttgcccagcgcacgtgcattctcctgtgggaactcggagggcatgtggtgagcagtctcctgtcagttgaggtggaggctcccggcccatctttgctctcctcaggctgcccagctcctggcggcacatggtggcctggcaaagctgacttggcctcctcagttccccacccatccgcggatcatcgccttccctagccacctctctctatagccaccgacatctgcggagcgtcacagactggttctgagctgtggtttacaaattcaacccaacacagagtgaattcaaatttgcttttggaacagcctttatctccaattaagtgcaagtatatttacactatgtgatattaaaggacttctccaatgactgggaggtactgaaccaagatgtttgtaaagaaacggtggggtgaggtggttaggtagaatataccgtcctggccatttctcttccttcaggcgagtaagcgctccttcagcagaaaggctgcggattgctggctgtgctctgtggactgggccagtaggtgtggcccaggtccaggtcctggcacctctgctgagtgcccagcctgagatgacacatgccatcctggagagaagcagagagggtgctgtctccaggcgttctccagacagcctgggcctggcttgctgagccagctgcaggaggggatctcctgactggggcttgggaccagatctgctgcagagaggcaataactctgtctaaaaagaaaacttgtcccgtgtgattacaaaaacaggaaaaggctccaagctaggaaatgagatttgaggtatggagaacattctcacctgatggaagcatcctgttcctgtacaggaggaggagctggtgcaagccctaggccacatatgtcacagttgttttggaccctccgtagcttttatactcataaaatattaaagttgcccctttcatatttgggtcattgaaagagcccaccgtactctaggttcctgctcactatgcacaacatctcagaagatggcgtacaaaactatttttctaactatagcacaggtaatgtgggggtggggaggcttgggatatacctaaatgtggcaaatgatttatcttccaccttgagggatgaaaaggaaactatgcacttgaattttaattaaaattttaatttaattcattggatagcttgtgccagaaagaacagtcaatattcaagaagcaaaactgacgattagctcagtttcgggcctccctgtcgggggagttttcttgtctggaacacaaacacctacaagtagagtgtgagctggttcttgacaatcagatctcatcaaccctttgaaatgttctgggcagcacagctccttggtctgcatggttggtgtaagtataatcaagtagtgaaattgtatggtatatacctatatgccaacagtgtacacccgtatgtgcagaatttgctaatataaccatttcaataaaaacctattgaaaaagctgatttgaccacatggagtattgttggtggtgacgtgtatcactgaggactctcttggttacaaatgacagaaaacccagccaaaactggctaacacaaaaggggaatgtcatggctcccaaaagccaaaatgcccaggggtgcctatgtcaggcttggtgtgatttcaccctcaaatgctgacaccaagacacatgccaactttg

SEQ ID NO: 1589 - DNA, 5063 bp, Homo sapiens
cgagattactgaattttacaagcttgacattttctattggctttataagctcttctcatgtttttattaccctcacatccaatccgttcgagctacacgctaaatcaaattggtattttatatttttatttttttagaggcaggatctcgctctgtcacccaggcaggagtgcagtggcacagtcatggctcgctgcagccttgacctcgcctcagcctccccagtagctgggaccacaggctcatgccacgcacgcccggctgaagctagttttaactgaagaaaactcaaagtgttctctcgccgttaacctttattattgaggcattggctctgctataggaaaacgaggtgacgttaatgtcggtggttgacattaaccactggcaagtgacagtgtggctccttgacaagtggttgctgctcataaatgtcatgaaacaaaaacactgattttagagaagtgggattctacagttaatatcgccagcaaacttttattaagctctcactctgtgccaaacacatgcttgaagttggggtgaatccgtgaccattaagatgttggctgttcatgggcacgttatcaagcaactggggtgtgagagcgaatgataagagggtgaatctggatgaggagggacttccagggcacaggtggaggagaggcattgcagccatagagaggcccaagggaacagtcaagacaaggcggggacagtggccaggaggcgagggcagcacttcctgggcagggaaggcttgccagggagaccagactcctgtctctgtttggaaagaaaaggaaccgcactgggggtcagggaggttaggcacggcaccagcctgggatgccagtcccgcctgaggggccaaggcaaaggggaagcattcacagaccccacaccaggctctgacgccaagtggaagaagagggagatagaagcagaagcctgggcttccaggcctggttcctgggcgggtgttgatgggacccagggagagtcctgtggggatactttgggtctgggctggcaggggctctggaaggagaggcatggaggtgcgaacctggtgcccaggtggaggtgcagtgggggtaaggtggccaggctgcagacccctgcatcagaatgcctgcgaagctgtgggttttttgtttgtttgtttgttttatttcgagacagggtgtcactctgtcgcccagactggagtgcaggagcgccgtctcggctcactgcaagctccgcctcccaggatcaagtgattctcctgcctcagcctcccgagtagctggatttacagatgcatgccaccacgcccagctaattttttgtatttttagtagaaacgaggtttcaccacgttggccaggctggtctcaaactcctgacctcaaatgatccacctgcctcgtcctcccaaagtgctggaattacaggtgtgagccgcaccagcctgttttttaattttatttagagacagggtctcactctgttgcccagactggagtgcagtggtgtaatcttggctcactgcagcctcaacttccagcgctaaagcaatcctcccacctctgcctcccgagtaactgggactacacacgcatgccactacacccaggtaatttttaaaaattttttttagagacagagcttctccatgttgcccaggctagcctcaaactcctgggctccagtgaccctcccgccttagtgtctcaaagtgctgggattacaggtatgagccaccacgcccggtcagaagctgtgtttttaagtggacataccatcttgtcctgctgaagtatctccatgtaatcacaatatctatgtcacccaaatctcctccttcctcctccctcccccaaaacacccccacaggcatgcataccctcccatgcgctggaggcagaatctcccaaggggagctggccaggagaggtgtccctgagttcagatggaggtggaagccagagtggggctgggaccacccagtgacatgaggatggggcttgggataaagccctggggacactgacatttaaagtgtggacagaaggagctactgaaggcaatggatttagaaaagcaattgagtatgatttccttcttcaagaaaggctgtccaactagctctcacttcctctcgtgtgttcagtgtcacccggaagcagagtttaatgtgactaaagtcaacattggctcacactgtcagggagtgtgggaagatgagtaaggactcatcgcagggcgatacccacagcttaaaataggcaccttcccctcccaggtctggttagggcagttgttacatatgaggggcgtggagttttgtcttgtattttggccttgttggtaaagcattccaaagcttcgacacaccctcctttcagcccattaggaaaggctgttgattgtaatattcacacagctccctgggctatggttaagagccttgcagaaggactgggagaagccctgtgtgtttgaagtattgtagcatcagaaaaaaacaccggaagaaggcaggtggggacaaggtgcctatgtctgctccttggaattcctttccttactgtccgaggcaactacagggaaagcaaagcgtgagcccccaaatccacacctgggaggaacgttcccctttgcaaggcatgggactggctggccctgtgtctcacgggggctctgagttttgaggtcacactagcctcctgaggcctggctgagagggctgggttgggggtcaggaggccccctgtagccacgaagctcctctggggcattgttaaaggttcaccctcttttttgtgggtatcctggaagatctcaagaaactgagcttggaagaagagaggctgagagggtctcccgccgcctgcgttctctgcagctatggccccacagcctccagtgaccatggaggggaaggtgccacccgccttggctgctgaaagggtgatgctcttatgcctgagtcttggctcctgtggtcctgcagagaccctgtgggggccgcccggtcgtcacctgcactcatcttgggttttccttccttttccaccctaagctgaaggtatttttttcctgttttcttcactctaacttggggaagaaggaagatcctttatggaaaagaaaaaaaaaaaagcacctttgaacgtcctgcaacttgagtttcaagctttcagaaggattcggtgctgctggcctgctcagacctccgcctgggctgtggagttcctcctgttggcccctcctctctgtaccacaaaagctctaggcggcccagccacccctgtgaaagcggcgcccgtagccagacgccaaggctgccgtcccgagccgagggtggcaccttgcccagcgcgcgtgcattctcctgtgggaactcggagggcatgtggtgagcagtctcctgtcagttgaggtggaggctcccggcccatctttgctctcctcaggctgcccagctcctggcggcacatggtggcctggcaaagctgacttggcctcctcagttccccacccatccgcggatcatcgccttccctagccacctctctctatagccaccgacatctgcggagcgtcacagactggttctgagctgtggtttacaaattcaacccaacacagagtgaattcaaatttgcttttggaacagcctttatctccaattaagtgcaagtatatttacactatgtgatattaaaggacttctccaatgactgggaggtactgaaccaagatgtttgtaaagaaacggtggggtgaggtggttaggtagaatataccgtcctggccatttctcttccttcaggcgagtaagcgctccttcagcagaaaggctgcggattgctggctgtgctctgtggactgggccagtaggtgtggcccaggtccaggtcctggcacctctgctgagtgcccagcctgagatgacacatgccatcctggagagaagcagagagggtgctgtctccaggcgttctccagacagcctgggcctggcttgctgagccagctgcaggaggggatctcctgactggggcttgggaccagatctgctgcagagaggcaataactctgtctaaaaagaaaacttgtcccgtgtgattacaaaaacaggaaaaggctccaagctaggaaatgagatttgaggtatggagaacattctcacctgatggaagcatcctgttcctgtacaggaggaggagctggtgcaagccctaggccacatatgtcacagttgttttggaccctccgtagcttttatactcataaaatattaaagttgcccctttcatatttgggtcattgaaagagcccaccgtactctaggttcctgctcactatgcacaacatctcagaagatggcgtacaaaactatttttctaactatagcacgggtaatgtgggggtggggaggcttgggatatacctaaatgtggcaaatgatttatcttccaccttgagggatgaaaaggaaactatgcacttgaattttaattaaaattttaatttaattcattggatagcttgtgccagaaagaacagtcaatattcaagaagcaaaactgacgattagctcagtttcgggcctccctgtcgggggagttttcttgtctggaacacaaacacctacaagtagagtgtgagctggttcttgacaatcagatctcatcaaccctttgaaatgttctgggcagcacagctccttggtctgcatggttggtgtaagtataatcaagtagtgaaattgtatggtatatacctatatgccaacagtgtacacccgtatgtgcagaatttgctaatataaccatttcaataaaaacctattgaaaaagctgatttgaccacatggagtattgttggtggtgacgtgtatcactgaggactctcttggttacaaatgacagaaaacccagccaaaactggctaacacaaaaggggaatgtcatggctcccaaaagccaaaatgcccaggggtgcctatgtcaggcttggtgtgatttcaccctcaaatgctgacaccaagacacatgccaactttg

SEQ ID NO: 1590 - DNA, 133 bp, Homo sapiens
ttttttttttttgagacggagtctcactctgctgcccaggctgaagttgcagtggcgtgatctcggctcactgcaacctccacctcccgggttcaagcaattctcctgcctcagcctcccgagtagctgggac

SEQ ID NO: 1591 - DNA, 282 bp, Homo sapiens
cgctttggtgattttttttttttttgagacggagtcttgctctgtcacccaggctggagtgcagtggcgcgatcttggctcactgcaacttccgcctcccgggttcacaccatcctcctgcctcagcctcccgagcagctgggactacaggcacctgccacgacgcccagctaattttttgtatttttagtagagatggggttttactgtgttagccaggctggtctcgatctcctgacctcgtgatccgcctgccttggcctcccaaagtgctgggattac

SEQ ID NO: 1592 - DNA, 133 bp, Homo sapiens; identical to SEQ ID NO: 1590

SEQ ID NO: 1593 - DNA, 246 bp, Homo sapiens
ttttttttttttttgagacggagtcttgctctgtcacccaggctggagtgcagtggcgcgatcttggctcactgcaacttccgcctcccgggttcacaccatcctcctgcctcagcctcccgagcagctgggactacaggcacctgccacgacgcccagctaattttttgtatttttagtagagatggggttttactgtgttagccaggctggtctcgatctcctgacctcgtgatccgcctgcct

SEQ ID NO: 1594 - DNA, 115 bp, Homo sapiens
tttttgtatttttagtagagacggggtttcaccgtgttagccaggatggtcttgatctcctaaccttgtgatctgcccacctcggcctcccaaagtgctggggttacaggcgtga

SEQ ID NO: 1595 - DNA, 3788 bp, Homo sapiens
ttgttattgcaggtaagcatgtgacattatttgtgtgttgccttccctactagaacatcagctccacaagggcaggaatttttgcctgttgtcaccacgatgtccctggcacccagtatgttcttggtgtccccattgatgatgcagggatgtgtggatatggggcagtggactgtgagcatgtgatgagcatgtgacccagcccctagtgaccgcaccacatggcacaggttgcttataaaaaccattttaaattaaaaaagggaggaagcatcagtgcacacagatggggacacaggggcagagggcccagccccaagtacagtgtggtcaccccacagcccagtgggcaccagggcagactcccctcgcagcacagacagctgaggcccgggtgctggttcctctaggtacagctttggtccttgtgggctcagaggtctgcctttcggaaacttgctctgttcaaggagttcctggaaaaagaatgagggtgggtcagcatggccatggggcccccaactccatagacctcccagcccacatcctcttcctcctcctcctcgtcttcctccaaggatccttctgggatctctcctgtccctgatctggctgtgggattctccgattctctcttgcagtccaccacggaaggtatgaatcatccccattttacagatgtagaaactgaggctcagaaagatgaattcatgtatctgggaaatgactgctcagagcctgccctgcctttgtacatctggatgacatattcagatgcttatgcaaaattgaagccaccgcagccaggcgtggtggtggctcatgctgtaattccagcactttaggagggcaaagcggatggatcacctgagatcaggagttcgagaccagtctggccaacatggtgaaaccctgtctctactaaaaatacaaaacattagccaggcgtggtggcagatgcctgtaatcccagttactcaggaggctgaggcaggagactcgcttgaatctgggaggcggaggttgcagtgagccaagactgtgccaactgcactccagcctgggcaacagagggagagtctctcaaaaaaaaaaacaaaaaaaaaaccggaaacaaaacaaagtccaagctaccagcaaacatgttgctgtgtatgtgtacaacagcccccatcctgtacctgtcctggtctgcctctgcatcccctctctagtctctaggatgggggcactaggtcaggcacctgaggccgggtggggtgggtgccatcagctggggcaggcgctgggtaagcaggggctgcagagcctcccgcaggcggcagtagttgcgctccagctcacggtggtactccttctggtccggcccaatcagggccttatttttccgcagcgcatcctcacatctgagggccagagggtgggagatgctcagagactcgcacacgggactgaaagcaagactaggggtgggggcacccataaggcgggaccaggcctgcagaaagacccgcaataggaggtcaggttgggagagtggacttaatgggaatcgggcagatgggggagccatgcagagatcagatgggcagagagcaggcctatgcaggttaggcagacacgagacccctcctggggggttttgcgcctacttcttgcagaagtccttgaagcagagccgcaatttgttgtgatgccggaagagcttggggtcttccgggatctctgctaaaaacacctgggccacctccaggggaccctgtggggtgagagggactggtgagccagcctgcatggcacctggagtcccccgtgcggcttgcatcccccttccaccagccgtgcctggttcacggtgggccctacagagccctgaagcaccatctgtagcatcttagcatctggtgggtcctgctcggtggcaaaggccagctcccgtgtcttcttctgcatgtcctcgatggccacctccactggcgtcagcaccgtctgtggggtaaggggaggggtgtgtactcgctggggcctgaggaggtcctgatcgaagccagtcgggggcagctcagaccccgctgggagtgagaggggtccaagaacccaggcaatgaacagaatctgggggccttcctgggtctgactctgggggggtccagccttgggtctgctgggtctggtgccctggggtccaggggctttacctctggggtctccagacttccttgggtctggaggtagagatttggactggaagttggagtttggggtccccaacctggttctggggtacatgagccaatttctgggtctagcgtgtccacgcctctcctctctgggtctggaatccctgggcttctcctccctgggccttcttagatttggagtccctgtgcctcccctttgtgagtctagaatccctgggtcctcctgggtctggaggtagaggtttcagtttagagattggaatgcagggtctccatatcttctcagcccagttctggggtacctgggcctcttcctgggccacacctctcctccctgggccttcctagatctgggctccctctgcctcctctttctgggtctggaatccctgggccaccctgggtctggggtccctgcatcttgcctcccaggtctccctgggtctggtctcctcccctcccctccctggggatctggtctagggtccctgtgccacccctctctgggtctgaggtccgtgaaccaccttgggtctgggtccctgtgtctaccctcccctcccctcccagggtctgatgtcccctcacctccccacccccgccaggcccaggatccccacccacctcctcccggtggcacacacggatgcgagtcttgatgtaggggaaggcgtggtcggtgctgagcagcgtcttacgcttgtgttgctcgggcagctccccgtgtgcgcgcccatccggcgtgaacggcgtgcagaacaggaatgtgcgaagcccatagttgcggtcaaagtaggtcacccggtccttgagctcgtaggtatcaaagtacggttccacatacgtgatctggatgtaggcctgggcgcagggtcaggtgtgaggatcccacagccccagcacgcacagcccaagccctgttcctggagagaggggatctggggactttgtcatttccaagtcttcctatgtctggatgtttgggaatcccctgaggaataggttttggggtccctcagtgaaatatgatttggggtttcccagagaaagaggatttgagggtccccaggaaacagcacttggagtctctgtgaatctaagattttggggaaatggttgggggacccaccttttgtgagtcaagcttggacttgtccacagggttagagtctttgataatctcaacgacgtcgtcgccaaatctctccgtgtagaactcctggagacacagggctgactcggggccacccagggacagcccctactccagccccaaggcagccccatgccccgttccacccccaaccacaaggacgtgcctccagccggtgtgagatctctgccagcttcgtgatcgatggctccttgtacacaaactcctgctcatccaggtcaccgaagtgggcgccgtagaagcccacgcggaaatacgtcccgaacacgcgctggggctgtgagaaagggtgtggttgtccgggaggcccctgctggaggtctccctgccccagagataggtgtctcgaatatcaggatgggagtgtgaggaccccgagaacatcagggcatgggcacaggcagggggccctg

SEQ ID NO: 1596 - DNA, 128 bp, Homo sapiens
gagacaatgtcatgggagaggtcagaggtcagagttccctcaacccccagggtcctggttaacactgccccgtgagaatcattccgtggggggagagatcagagacgggaggggggcgggggcgaaga

SEQ ID NO: 1597 - DNA, 3211 bp, Homo sapiens
tgcgagtcagactgcctgcagcaccggctgaggcttacctggggaaagagaaccacggcgccgggagttaggagtctgtagggggaggggaggagatgaggccagccccctccacagctggttcacccagccccccaacccaggtctgggacccactcatagacgcacacccagcctggctgcggaagggccccccccgaccccctcccccccgcaggtctggaacaaagaaaccaaacctcactgcctgcttgcacatctgtccaggccctggacaggctccagctgttcccatagcccagcctccacatagccctggggctggggggccccaagcccaacaggccccacccttcctgcaccccctcccctcagcccaggcccggagctggccacacggaaggatgggggttgaggcgctaaggggttggggaagaagggaacctcgtcttcctgcaaggatctgaggagacagagacgcagggggacaaagagaggcaaagcatggcgaaggggacccccagtgaccccaaagctgagagctgggtcaggcctggactgggtcggggggaaggggtagggaaagttggggaggcagctaggagtgaagcctttcccctttatggaaacaattttctctaaaaataaacagtttcactgccgggctacacagaacttcctgcccgcctaggatgcgtccgggcccaggggcgcagtagggatagagggccgggtggaggcccaggaagtcctgggggtggaggggaggaagtaagagggggcgcctggaggctgcaaaagggagggacagtcagagcctctcactaaacccccctcagccttggaggccggccagggctcttttgtccccaatataacccatctgaacttggctggtcctttctgttatctgacctccagccatcatgctgcagaggccccagcccatcccaccatcagagtaaatcctttctggcctttgagtgctggggccggcaggtaccttgggaggatgggccaggtagggcacctgctgggcatgaaggcagggctggggctccaggggcacctgagcttgtccttgttctcccgtcctgtcttgctttgtctctctccaagtctctctgtgtctctccacgtctctctgtgtctctccacgtctctgtctctctgcgtctctctccacgtctctgtccttctgcgtctctctccgtgtctctctccctgtctttccacgtctctgtcttcgcttctctgtctttcaacacctggaacacatggtcaccaattgcaggaaattccgttttccatttgcctggaggctcacccctgagcaacagaaagttgattgaaaatattttctggccaccaaagagagatggagaagcagggagcaagcgggattggagcaggattggaatagccgagcggggtgggctgggggtgggggaagtgagggtgctgctgggtaaatagtatagtaacagtaatactaacatcaactcttttttttttttttttctgagacggagttttgctcttgtcgcccaggctggagtgcaatggcgcgatctcagctcacggcaacctctgcctcccaggttcaagcgattctcctgcctcagcctcctgagtagctgggattacaggcacctgccaccacgcctagctaattctgtatttttagtagagatggtgtttctccatgttggtcaggctggtctcgaactcctgacctcaggtgatccgcccgccttggcctcccaaagtgctgggattacaggcatgagccactgcacccagcctaacatcaactcttttaattgtcatgacaattctatgagatgggcacttatcgccccgtttcacagacaggggatgcagagggtacagaaaggtacagtggcttcctcggggtcactggggccatggggaagtggctgggcctgaacatgaacctaagcctggtggatccccccactgcccaccaagccaccaccctcagactccacatcagatatctctacccgtttcccagatacggagactgaggtctgagggtactcagtcatctcaccgccctcgatgaggaccagcacgtcccgagtaaggggaagagaaaggagacgagggggtgtggtgggggagatggatgtctgtggctgagacccttctctcgccatgggacccctggggaatggggaaggggtgacaggataagacagagatggagagactggagcctataagaggggacaggtagggagcgcagggaaggggcgcgggtctccccaacccaccacccaagaccggcctgcacatcgcggaggtcggtggtggtggtgggggggggtcttcccgccccaaactcggggtggggggaggcgagaaggaccccgccccgtgcagagagggggcggggcctgtgggatcccgggctaatggcaaacagctgccgctccccacgccggcccagccgccaagcccaggcccagcccggccggacgcccggccgccttcccgccgtctggggcatggccgcggaggagggcgaggggggacagtgcggggagagggcagagccggggaggaacagaggcagaaagtgggacagagacaggggagagcgggcagaggggagccaagacaggagaaacgggcagggcacgaggaatcgatggggggtactgggaggaatcgatgggggtatggggtcaaagacgaggagggggcagggacgcggggacagacactccaagtctggaaagtttgggcacagaaggtggagttggaggcagcggctcgttgagaccagcgaggtcgtgtcccagggttggaggcggggggtagggtagtaggtgtgtgtggagggggtgcacactcgatccccgaaccagacttgaacccctacccagccccgggtcccactcgccttgcgcgctccggccgctgccttccctgggtcccgccgcccgagcgtcttcgcgcgcgccgcagcctgggcgcccggccctcggaggtggctccgcccgcaccacgccccctccggctggtcccgcccccccagccggcaccgccccctccagccgcccgggcgccccggccgcggtggggggtggggatggagagacgctggttggagactggatctcacctggacagcaggtgtgtgtgcgcgccggggtgtccggcctcgtccttccttcctccc

SEQ ID NO: 1598 - DNA, 2914 bp, Homo sapiens
cgggaaaacgtggaaagagggtaaaatctgtttccagattcctctggcacctactggtgccctttggataagcaagtgctgactccagcaaggaagggctgatgtcctgccatcaggccagcagacgctggggccaggtgctcccctgcgtcgtgagtgtctcgaacttaacgagcctcaatattctggggagaagttttggtttctttcagcccctgggggtctgccctgggctcccggcctccggggctgctcctcaggctggacagcctaggtgagccctgccccgcctgcccccagagccgacgcgcagcctccaggttccgccagcaccaacgtggtcctgcgccacgatggcgccgtgcgctgggacgcgccggccatcacgcgcagctcgtgccgcgtggatgtagcagccttcccgttcgacgcccagcactgcggcctgacgttcggctcctggactcacggcgggcaccaactggatgtgcggccgcgcggcgctgcagccagcctggcggacttcgtggagaacgtggagtggcgcgtgctgggcatgccggcgcggcggcgcgtgctcacctacggctgctgctccgagccctaccccgacgtcaccttcacgctgctgctgcgccgccgcgccgccgcctacgtgtgcaacctgctgctgccctgcgtgctcatctcgctgcttgcgccgctcgccttccacctgcctgccgactcaggcgagaaggtgtcgctgggcgtcaccgtgctgctggcgctcaccgtcttccagttgctgctggccgagagcatgccaccggccgagagcgtgccgctcatcggtgagcagcgggggcgcggggggacctgacgatgcgctggggtccccccagggcggggccgcgacagggcctgggtctgcggaacggccccactgcagaaagtgagaggggggcgtcctgggaacgtgccctcattttaagactgaggggaaaggattagctccttccagggagaacacccctcacgacttggcccttgatgatggaacatcagtatccccagatcctaatgataggcaaaatctgtcgactgcttgctgtgtgccaggcactcccctaagcacttgacctttattaactcaggtaagcatcaccacaaacctaggaagtaggtcctctgggtatcccatttgtacaaaaaggattcgtatcttgccccagctcatgcccgtcgttatttgagagcgggactgtcctggattgtgtatgagtgcagcctccagcagtgacgggagcaattagagagcagtagcttccgatgacccacgtgtaggaatgaaggatggggagaactcggcccttacctccttcctgcttccatccatggggcttggagggtctggagagcttcatggtgggcttatttccatttgtgcagaggtggctgggaagctcaggaaccacaggcttttgttttgagtcaattggctttctctctctcttgcagggaagtactacatggccactatgaccatggtcacattctcaacagcactcaccatccttatcatgaacctgcattactgtggtcccagtgtccgcccagtgccagcctgggctagggccctcctgctgggacacctggcacggggcctgtgcgtgcgggaaagaggggagccctgtgggcagtccaggccacctgagttatctcctagcccccagtcgcctgaaggaggggctggccccccagcgggcccttgccacgagccacgatgtctgtgccgccaggaagccctactgcaccacgtagccaccattgccaataccttccgcagccaccgagctgcccagcgctgccatgaggactggaagcgcctggcccgtgtgatggaccgcttcttcctggccatcttcttctccatggccctggtcatgagcctcctggtgctggtgcaggccctgtgagggctgggactaagtcacagggatctgctgcagccacagctcctccagaaagggacagccacggccaagtggttgctggtctttgggccagccagtctctccccactgctcctaagatcctgagacacttgacttcacaatccacaagggagcactcattgtctacacaccctaactaaaggaagtccagagcctgccactcccctaattccaaaaaaaagaggaactctacaaaggccaagatcacagagtacagtcttggagggacagaattgtttgtgctgggtattggagctctcagtggggagcacatgggttataatgagaaactgaactgtactgctgcatttcctgtcttccttcctaggtggctgctttgcagggctttggctgttacctttccctgctgaggggctcagggaaaagggtcggggattctcagtcgagtttccagagcaggaggccctacagacatttggccccaaatccctgactcaataaagtaagcgtgtacctagcacctcctcgatgccctgtgttacccatgaggtctgtggtagtggaagctgggggtccaggtctgtctacttcaggtctcatggccgctggcgcaagtccaagttcaaagcctgagaacctgaagttctaatgtccaatggtaagagaaggatgtcccagctccaggaaagagtgtgaatttgcctttcccttatttttttgtcctctccatgccctcccacattgagagtggaacttgccactgagtccaccaactcacacgccaatctcctgctgcaaaccctcacagacacatccagaaataatgctttcccagctgtctgggtattgctggtgtccatggtggtgggttatcagaacttattaatgtcactgtcactaaagttggtatataaccccccactgctaaatttgactagcttaaaaaaaaaaagaac

SEQ ID NO: 1599 - DNA, 5257 bp, Homo sapiens
gccggcccaaccctttattcagagtctcactcctacagccctgggtaaggttcagtccccagattgtctcctgtttctccaccagccggtctggcagctaccagagaaggtcccagagttccctgcagatgggattgacaggaatcttggttacactgaaagcacacatggccaacatcctcaggatgggcagaggcagcaggcgaggctgtcccgtgtctcatgcatcaaaggaggcctggaccatctggaaaggccctcaccacgaggaaccagagcagcagcagcaaagaccagactgcagagagggggctctgacccatggctgcagggaaaacaggcagagaggttgggggagagagagagaaaaaaagaggtatttaggagcacaggagcaaaagtggggacatgcagatacaaggtggagagattggcagagtgagctggacagactgatacacaaaactgccacgggcaacagagatgaagatcaagtttagggaggagctggtccaatggtaatgggttatcagaacttattaacaccagtgtcactaaagttgatgtacagtccccccactgctaaatttgactggcttaaaaaattttaggcaacctgggcaacatagggagaacccttctctacaaaaaatacaaaaagtagccaggcgtagtggcatatatctgtagtccaagctacttgggaggctgaggtgggaggatcgcttgagcccaagagtttgaggctacagtgagctgtggtggtgccactgcactccaacctgggtgacagactgagaccacgtctcaaaaaaaaatttttttaataaagaatttaggaaggtagacagagatgagaccaattagagtcccagtttctcttccagaggtcattgggtctaacttaactgccttctattgccacaaataaggtgctgcagagtgggatgaaacatggatttaagatcagagtgggatctgctgtggctgaacttggctcctctacccaaaccctggtaggagaggtgtggagtggactagaaggagaaatcctaaacttttccagtatctggaattacataatcagaactcaaagatgcctgggttggaagctggaaacctggcttcttgtcctggctctgccataaactcattgtcaccttgagcaaataatttgtctctgggtctcacttgaccatataaggggggtaatgcctcctgttctgcctccttcccatagattactgtgcagtaaagatgagatgagatgatgatgagatgagatgagatgagatgagatgagatgagatgagatgagatgagatgatgagatgagatgatgagatgagatgagatgagatgagatgagatgagatgagatgatgagatgagatgagatgatgagatgagatgatgtctggggaggggtgggaactatcctggtgtggtggttcagagtttggctcttgagccaggctctctggactccacttcttagtagctgggtggcacagggccagttgcttctcctctgcacctttgattttttttgtttttgttttgttttgttttgagacagagtttcgctcttgttgcccaggctggagtgcaatggcacaatcatggctcacagcaacctccgcctcccaggttcaagagattctcctgcctcagtctcccgagtagctgggattacaggcatgcgccaccacgcccggctaattttgtatttttagtagagacggggtttctccatgttggtcaggctggtctcgaactcctgacctcaggtgatctgcccatcttggcctcccaaagtgctgggattacaggcgtgagccaccacacccggcctctctttgcccctttgtgctttggtactttcatctgcagaacagaggtgatgacagtaccactggggtgtggtgaggatgaatggcatgatgtgcctggagtggatcagaggaagctggggggtccttcctgcccactcacagagttctgaaggacaaaggagttctgaaggcttggggaggagctgctgtttcttccctggaaatggcccattcccacctagaaacatggtggcctgggtaggccttggcacaccaagtgtccgagggaagagaagagtcatagctggggatcatctggtccaatttgcttattatacacacagagaaactgaggcacagagaaagaatgggttggtcgtagagaaagttagagcagagcctggactagagcccaggcctccagcaccaaaagcctggcctcatggccttcaaaggtgggtttgagggagccctgagggcagtaacagagacagtgggttctgcactgggaggcagagaaggaccaaaggaggactttgtggggagcagcccttctgtccctcacctcagtgcagcctgaatctctcaggggcctgatcagtggccttttcctgcaagggataggcagatccaggctggagagcaggtgtccctgctccctcaaccatctgctctcccacacactcatctcctggctaaggctggcaacccccaaggtgccacttcagctagtgcacttttttttattattaatgcagttgtttccttataaaagattcaggtgggccgggcacggtggctgacgcctgtaatcccagcactttgggaggccgaggtggatggatcacctgaggtcaggagttcaagaccagcctggccaacatggtgaaaccccatctctactaaaaatacaaaaaattagccgggcttggtggcatgcgcctgtaatcccagctgtaatcaagaggctgaggcaggagaatggcttgaacccgggaagtggaggttgcagtgagccgagattgtgccattgcactccagcctgggcaacaagagtgaaactctgtctcaaaaaaaaaaaaaaaaaaaaagatcgaggtgatggggccaaccccagagcagcctgctcatccctgaactgagtcccacaggtgcctgcagcccttacctgaattatccagatggcaaggcccagacttgcacttcttgtctatagaaaagaaacagtaaagaatgaaaggctcaggagctgtcaggatggaaagggacctcagagccctggtagtccatccctgacttgttctaggagaagttggtgcatttccccctaattctgctctttcatggtggaacctcccttgactaggtttgcctcgacccatgagcagcagggccagaagggagtgggccatcagagccagggtctactctggggcactcctgctccctgggcctataactttgcctccctgccacactcacctctccctcttccatgcctcgccccagcctggtttgttttctttgcatgccctccttaccttctgtcaactcatgcatgctcctgatgttgtccaagataggaagtaaagcccatagcccttcagaaattaagaacctgggcccatcctcatggttcttcttctggcctgtgctggggacatgaacaggaggagcatccaccacttcctgaccacagcctgagctggaccttaggggcacagcacccaactgctgtctccttgcccccaccaccccacccagcacacccttcagcacataattcctcttccatctcataaatgcactgttctcagaaactgagggtgggactcctactcatttctggcaacagctatctaggtgtcaataatctggctggaaaataattcccttccagcctctgaccaggagaaaagcccgaccgggtctgcttgcccactcaaatggccagagaccgctgcgttggccaggaaacctcttcagcctcccagcaggcaagtggcgaactatggcttagatcccttcaggggcagtaagtgcacccctcagaaggttatgtctccccttagatggaaggggttgggagctggtggatatgacttgtatttatgtatccctgggacacaggagataggggcttcggtttgccaaagtccctggtggatgtggaaggtccaccttccgcacaggtgccgaccagcgcttgccctcctacctttgatgtactcgcagttgtaggtgctgtgcttgcccagggctcggaggtagatgcgggcggggccctgggccagtctgctggcattgatcacttggaaggtctcaaagggggggatcagcacctcttcctctccagggaagaaggagtagcccttgataggggccccaaggcaggtccagatgccgaagaaggtgtcctcaccaaactgctgggctgcaacatgcttcagggaggcagaagcaaagccccccagcctcacggtggcccggggccctgctggccggaagcgcaggccgtgcacacctcggaacacctggtggcaccggggtggacgctggccgctgcccaggagctgcagggcctcagtcagcaggaaatggagtgtcttgaaggagaagtggtggaggtagtgggcccgggagcggcccgcctcacgcacggctgcattgaactccttgtgcagggggctgttggctgtgtaggccaggagggccaccccatgctcatcgcggaagcccaggggtggcggggatggacgggtggggctgagactccactctggccacctggcctgacgctcctgccattggctgcttgccagtgtccagctgtctgcatacacctggttggcctggaactccgtgtggttgagatccgggagagcagctgtcatggcagcagcacagccagcgtactggtcatcaaaggaggccagggccatgtccagctgaatctcttgagagaagaggtctcgtcgtgtgatggggtggctctgggcctgaggggacaggagtagcagggactgagaggataggcccctgggagaatgagtcccctgccatccagctctcccctccactgagaaaggcaggaagggccccaaacacacctggtggggaaggggattgggaacctctggctgtaatttccccaagactagcatctggagctgtccccttgggctgagtgatccccaggggaagcgtcgggcattctttcctctctctctttctccctccagggttcagaagaagccgatggctcagttccctgctggggtgggaacagtgggggatgcccatacctgaagtgcttccatgaggcccacagacacaagaagcagagacatcatagcaggcatctgcatgctggtgaccctgggccagttgctgtctctttttgggtctcagtttcctcatct

SEQ ID NO: 1600 - DNA, 1802 bp, Homo sapiens
ccaggaggacactcataaggacagggccccagccctgggagtggagggtgtgagcagaggccctgggactagggcctgggatggacaaccctccttactgaccctccagagtgcctgggagctgagggccggctggctctcaagctgttccgtgacctctttgccaactacacaagtgccctgagacctgtggcagacacagaccagactctgaatgtgaccctggaggtgacactgtcccagatcatcgacatggtgcgttgtggtggtggtacagctgtggagtcttacctgtcacagtgtcaagaaatgaaggggtgagagactgggattattctccatggaatttcttttctgtaaatgttaatattaacaaaggtagcagttacaaactgttgggtactgactgttgggtactgagtattgggtgcctacctcgtgcccaatattttgttcacctgaacttactgaatccctgctaagcagggattctcaccccatattcctgctgaggaaacaggggcagaaaagagaagagcccactaaggtcacatggcaaggtcaggtctgggtgggaactggacggtatggacaagtcaggtttgtgggtgctgaccagagccctgcaggggagtgtgcacagacagggcaggatatgcatatacatgtccacatctctgccattccctgcccccactaggatgaacggaaccaggtgctgaccctgtatctgtggatacggcaggagtggacagatgcctacctacgatgggaccccaatgcctatggtggcctggatgccatccgcatccccagcagtcttgtgtggcggccagacatcgtactctataacaagtactgcctatctgggcccctcctctctcttacccctctctagacttgcccttagctgtgggggtgtagtgatcccctctccctaccacataacctggttgccacgctgccctggaagcttttccccaggacccttctaagctgccaggcactcagcccctccatggcacccccactttaggctatcccaggccagcccaggctgaacgtctcctcggaacctactgtgtggtccagggcagttgtctgaatcacaagggcctctctagggcacacttttagctctaagtctctcagggctccccgaagagcctgtgtaagggtctctttcctccaggacatagccctctggaacactgctttatgtctccttgaccagttccgtgtctcccagccagcacatagctctgcatattttctctggggcccttctacaagttttgcagatgtcccccaagggaagtcactgtgtgtcccggagctacctctgggttctgcagaggcctttttatacatcctctggctacgtctgtgtcccttctgggcccttcaggcaccaccccttccaggcctcgaaaggcagcgggtctctctaggtgcactccaccctctgtgttgctttgttctgaaaacaagaatcaaattaacgaaaaaaaaacaagcacaagtttatttatttatttgagacacagtctcgctctgtcgcccaggctggagtgcagtggcgctatctcggctcactgcaagctccgcctcccgggttcacgcaattctcctgcctcaacctcccaaataactgggactgcaggcacccgccaccacgcccagctagttttttgtatttttagtacagacgaggtttcaccgtgttagccagggtggtctcgatctcctgacctcgtgatccgcccacctcggcctcccaaagtgctgggatcacaggcgtg

SEQ ID NO: 1601 - DNA, 3310 bp, Homo sapiens
gtccaaggaaaagcctggaggctggtatagcacattccgtcgagggaagaaggtgagtcaccgaggccgagatggggagtgacatgaaaattgatgggaaccagcaggggggtttgaggggtgggttctgagaggtgagatgaagaggataggctttcctctaccttcctagggatcgcaagctggaggtggggtggcagcagcatcagatgtgtaacaggcagtcaattgccatacagaatgatggtgccaggataggggaagcacagggcatggtggaaatttagaggcagtgttggaaagaccagaaggcttcctagtagagatcacagctcatctgaagcctaaagaatgcactgtgttagcaagctaggaaggacaaggacaagtgttccagggagagggaaaggcatatgcaaaggctcagtcaagacagggtctggtgaatttgaagaagaaaaagccacatggctgggtacagtggcctgtaattccagcactttgggaggccaaggtaggcggatcacctgaggtcaggagttcaagaccagcctggccaacattgtaaaaccccatctctgctaaaaatacaaaaaattagccagacatggtgatgtgtgcctgtaatcccagctactcaggaggctgaggcaggaaaatcacttgagccctggaggaagaggttgcagtgagccaaaaccgtgccactgcactccagcctgggcaacagagcgagattccgtctcaaaaaaaaaaaaagcattattaagatattttgtatttttttcagattagctcttcaaaatctgatggagattttacatttatagtacatcacaatttgaatgctaaattttattgggaatatttgctctatatttagatttcataaaaccattgaacaacagttcaaaaagtagattcagactcaagttgttccaagcataagctttctgataactggattgaagctcagtcattagttgtgaatttttttaagtaaaagaattcagggccaggcacagtggctcacgcctgtaatcccagcactttgggaggccaaggtgggcggatcacgaggtcaggagatcgagaccatcctggctaacatggtgaaaccccgtctctactaaaaatacaaaaaattagccgggcgtggtggcaggcgcccgtagtcccagttacttgggaggctgaggcaggagaaaggcgtgaacccgggaggcggagcttgcagtgagctgagaccatgccactgcactccagcctgggcgacagagcaagactccgtctcaaaaaaaaaaaaaaaaattaaatgaagttaaaaaaaaaaaaagtcccagccaggcatggtggtgtgcacctatagtcccagctacttgggaggctgagatgggaggatgacttgagctcaggagatggaggctggaatgagccaggattgtgccagtgcaccccaacttgcgcgaaagagcaagatcccaacccttaccccccaaaaaaggaaaaaaaattaaataaagtaaaaaaaaatccctccttcaaatcagccacatttcaagtgctcaaaagccacgtggctattagacatgtggctgccatattggacagggcagaaatctggtatcagggacagtgagctctgtagatccagcgactcacaagagtggaggcagagttgtgtcttctgggtggggatgagtgtgttaaaaccctggattggtggatgaagcaatcagaatttgggaggtcagatggagtgggcatggaggcctactggatggagaggtggacagagtggatgttcaggtgactcttgggattctgccagggatctctaggtggctggtgggacctcctcagagatggtgacatggggggggtggcttgtctgccagtggatggagattccagggggtggcttctgcagaaagaggctcatggagcccctcatcctctgccttgccctcctctcaccagttctcctacgtggacgccgacgggtccccagtgaatgtcgtgcagctgaacttcctgaaactgctgagtgccacagctcgccagaacttcacctactcctgccagaatgcagctgcctggctggacgaagccacgggtgactacagccactccgcccgcttccttggcaccaatggagaggagctgtctttcaaccagacgacagcagccactgtcagcgtcccccaggatggctgccgggtaagagggtggggcagtggccagctagagaggggaggcaagatgtcggccaccttcccggtaactcaccgtctctgtcttctctggggacagctccggaaaggacagacgaagacccttttcgaattcagctcttctcgagcgggatttctgcccctgtgggatgtggcggccactgactttggccagacgaaccaaaagtttgggtttgaactgggccccgtctgcttcagcagctgagagtgtccggggtgggagggaccatgagggagccccagaatggggtgcatttggtgctgaggctttgaagccaccgtatttttcgttacctgtgactatggagccaatgggatgtgacttcgctcatcacggacagtcattccttctcctttccagggtgctgggggctggggttccctggcccaagggtccagcctcctctcaccccattccaggtggcatactgcagtctggctctttctcccctccctccccacccaagcctcacctccccaccccttgaacccccatgcaatgagcttctaactcagagctgatgaacaaaagcccccccacccccaatgcctgcctcctcactcctccgtcgctgcccttcacaccttttggtgctacccctccccagagttaagcactggatgtctcctgatcccaggctgggacccctacccccaccccctttgatcctttctacttccacggtgaaaggactgaggtcggactacagagggaagagggacttcccttgactgggttgtgtttcttttcctgcctcagcccagctctgcaaatcccctccccctgccccccacctccccaggctcaccttgccatgccaggtggtttggggaccaagatgttgggggggtgaatcaggatcctaatggtgctgccctatttatacctgggtctgtattaaaagggaaagtcccccctgttgtagatttcatctgcttcctccttagggaaggctgggatatgatgagagattccagcccaagcctggccccccaccgccaggccatagggcataatttgcatctcaaatctgagaataaactgatgaactgtg

SEQ ID NO: 1602 - DNA, 495 bp, Homo sapiens
actgtaacctaaagcactgggattaagcagtgggagaaagccactgtgcccagccccatattgttttgttcttttgagacatagtctcactctgttgcccaggctggagtgcagtggcgtgatcttggttcactgcaacttccacctccccagttcaagcaattctcctgccttagcctcccgagtagctgagattacaggtgcctgtcaccacacctggctcattttgtattgtatttttagcagagacggggtttcaccatgttggccaggctggtctcaaactcatggcctcgagtgatccacccatctcggcctcccaaagtgctgagattacaggtttgagccaccgcgcctggccccatgttgttatttttaactggtttattttctcctggtttagtgggagctcagatgcccagtggatgggaatttagacaagcttggacttcccactgggcccggagtgcaagacttgatccctaaacaattact

SEQ ID NO: 1603 - DNA, 11311 bp, Homo sapiens
  misc_feature (7272)..(7272): n equals a,t,g, or c
  misc_feature (7274)..(7274): n equals a,t,g, or c
ggatgaacatgggtggcatccaacacatcaaggtaggagaataattcactcccatgtggaccgggctttccccctgtgttttctctctctgtcttctttcttaaaggattgaggaactattgttaatttcctttttgaaatcatttgaatatcaaaagtatggcagtttaaaagtgaaatagctcagtttatgttcattttgcattatctagatactgaatatcctgaagctattttaaaaataaatctgtataaattagattttatgatttttctaaccatgaagaaaatcatatgtacctaatggaagtatcccacagcaggtaaaatctgtttatgggaactaaatcgttgttcaagctcagtagctcagtatagcttaatttcttcccagtttaactcactgtcaagattaaagtgttacttagaatattacttcctatttcttatgtctaatataccttttctccctaattttttactggaaagcaaacttgtttgttttgctttgttttgtttttccaaaggaaaaacactacctttgggtgagtcttcccaaagattgaaaatgacctttggcggactattatctgtaactaatgcaatgaacgattcgccatcattcatttattcattcatccattcattttataagcatttatggcgaacatcctatgtgtcatatcccctgctaggcactgggaatacagtaatgaaccaagaagacaaaaattcctgttcttatggtgctagtaggaggagatatattaatacaaggaggaggaggaggagatatattaatacaaggaggaggaggagttgatatattaatacaaacatacatacatgaatgtttaatgcatgcatatgtgcatatgtatatgtataaaatatattagctggtgataagtgctaaggagaaaaaagagaaagaagattggaatgccaggcaataagggctaaagttttaaattcaggtggttaggaaaggcctcagttacaaagtagtatttgagaagagacctgaaggagtgagccatgtggcgaaatagggaaagagcacaagcacgtgcagaggccctaaggtttgagcacgcctgttgtttaaagtgaggaggcagcgtggcaaggagagagcaaagaaaaggaaatgggagaagctagggtcagagagggtgcagggtcagatcatgcagccttcaaggagtttgtagggacttgggcttttatgccaaatgagtcagggtttttggaggactttgagcagagaaatgccatgatccaacatgtttttaaagaaccacccttgcttagctaactgattttcagtctctgcactgataaaatagcagtgtagtgattaaaatttgaacaaagtcctaacgggttttactgttaagtggaaactgatcactcttggaaacacacacaaaaaagatgacctacgattacacaaatgggaggggttaatgggataattaccctgcagctgacagctttgatctggtaggtggtgaattcaagcacgatatttttcagagccaaattgcccaagctctgatcttaatgatattctagggtgtccagtagtatctagctgggaaacatagaatgaacttactttaaaagagtaaaacgataattttaaatatttttaatcatatgttaaatagttacattttcaaatacagtcatgtgccacatgacatcattttggtccaagatggatcatatatatgatgatgtctcatggtctcataagattataataccgtgtttttactacatcttttttgtgtttcagtatgtctagatacacaaataccactgcgttaccattgcctacagtattcagtacactaatatgctgtacaggtttgtggtctcgaatccataggctatatcatatagtctaggtgtgtagtagtaaactatttcatctaggtttatgtggctatatcctatgatgtttgccaaaaggaaaatcacctaatgacgcctttctcagaaggtatctttgtcattaagtgacaaacaactgcaatgtgctcaatatgttttcagatggagtatatctgcagctaaaataatgggtatagttgttaattagaaaaagtacaacaaatatactcaaaagtgtccaagaagtctggaaatagagaaaatagtatgtctactgcactctttaccaggtgaacccattgctttaaattaggaagtacttcccttgggaaagtgtctagagattaaagaaggatctattgactacattattttaaaatataattagtgctgagtaaaaattagtttatcctgttttttgtctttgtggacatcatgtactaggctgaccaatataaaattgccacctttgcagttttaaagtggtcaaatatcagttaatttatgtgattcaatctaatgtaaatatataaacaggcacatggctcagatgtggtcattttgatgccactattagaatgcagagttgtccttatgaagcctaaaagataattatgaactttctgtgtcttttccattgccaggtcatgtgtgcatcgggcattgttacccattcctaggcctcgctccttccccaaacctgggggaagcttaggcaggcctgagagctccagcaaggttgagagttagaatagtactttgcaaggaggttgcagaaagagatgggggagagaggagcaaatgtcatagttgtctcttgctcatgacacttggttataaaaagtaacgcttcttatgaagttttacatataagatgaagtgagtggaccaagaaattataatacattttttatcatcaaagagttgcatcaaccaggctatagcacaaagtctgattttcagtactgcctcatgacagtaaatatgcattttctagaatggtgctgtccagcagaacttttgtgacaatggaaatattcagtagctgccctgtccgaggcagtagccactagctacacatggctactgagcacttgaaatatggctggtgcaactgagaaactgaatttttaattaattgtaactaatttaaattggaaaagccacttgtgactagtggccatcaagtgaacacagttctggaaactggataattcagatttttttacctagcatctagggaattggagatactgacttaaaggatataattattttttaaaatagggcttctaggctgggcacggtggctcatacctgtaatcccagccctttgggattccgaggcaggcagatcacctgaggtcgggagtttgagaacagcctggccaacatggtgaaaccctttgtctactacaaaaatacaaaaattagccgggcatgttgtggtgcacgcctgtagtcccagctactcgggaggctgaggcacgagaactgtttgaacccgggaggcagaggttacagtgaactgacattgcaccactgcactccagcctgggctacagagaaaaaaaaaatacagcttctagtttagtgaagaaaagggcaatttgagggagagaaaaggaactgcgttctgtgtgaaaggacagagaagcctggtgatcagagaataagatcccaaggcacttcactggggctgacattcagggagcctcctggaagaatcatttcaaaagcaattgcagtcaaaacagattttgagagcactcttagacccagaaatgtatagttgtctgcatgtaagtgctaaggctaataaaaatcagaagacatttggaagacatatccttgaattgaaaaaaataataattgaatatagcaaatgcaagttcccacttgttcagcaatctgtttaacttcttatcagagtcattgttaatacttccttttgttgtacatgccagtgcctggatatctaacgtacaatttcttgtgctgtcatttccactttccttttcaccaatatgaccagtaaatacagtaagaaatagacactattgatacagagcctggatagtcattaataacagtaatgttagtatcgtattgagcactcactatgtgtctaagcttttgacaggtatttggaagataggtaagcactggataagtattagttgtttgttgctacatggtgtcttcactctaagagatacaatttttaattgtgatggaaatgtagagggtcactggtgtttatccacatgggagctataactaagaatagatggaacaaattcatactttttctaatgggggaactccaacaatcttagctctgagaatttgcagaatacagatctaaaagagggtggaacgaataagggaggtaatacatccagaagcagaaaaaatgctgaaaaaagctaatagctgtgactgagttgccagggaccccttctgggaccaggcacacatggttgctagttgaagaatcaaacaaaacagttggaagccaacagagggtggggacagttgtgtttagtaggtcaggagtcacataccatactgcactaaaagtatatagataatgcatactgctgcaaacctgcagtagtaaaaaatttgacttcacattcttatcaagtcttttcattgcaaaaaactttattaggcaaaagttacttttacgttaacagctaaagattagaattggctgctattctctatccataggaaagtgaaactataaaatatttaatctttgtgccccgggagagggggggggcgccacaaaatattttttaaaaacattttctcatctctcattctcccatcccctccaccccattcccctaacatgaattttgtgccatggttccattttacaaggaacagtactagccccctgaggacaccaggaaatgataacctcacaccctgcattagtagaattgaaaatctgtttttctgccatttatccttacagtataactctcctctttcacattctgcaactgatctagtgcttaaaacaaatggagtcttcaaaagcaccaatagacaaggataaaattacacatacagacagggtttccatatgagaacattaatgtaaaactgggcagagggtcagtttcttagtctcttcattctctgagagagttttgtgatggatcagaatgtaattgctccctctttcccacccccagggaaaatatgtgtctgcaagagcttattatgagagagccttacagctggttccagacagcaaactgctgaaggaaaatcttgccaaattggatcgcctagaaaaacgattacaagaagttcgagaaaaggatcaaacatagcaccaccgtctgacccaacctcataggataatgtggtgcctctgaaaggggagtgatggaagccttgctttcacatcagcaggggcacaactaatgagattttctctcattccgagttcagggtgacacattttgggacatctgctggtagcccagtgctgaaggacttgcttttccatgaagaagacgaaatcagccatcaagggcaagaggtctgagagggaaggagaatgacatttacacattttacagatttttgtttggtttaactccagatttctcttgatatatctctgtgcttttgaaacctggagatctaattctgtttagacattttttgtcccacaaatacagaagcttgaaatgctatgaaggcagagcttctattctttatgggatgaaatatttcaaaagaggataaatcctctgtggtaagccatttggaaaatcctaccaagaattggcttatttaattttccagaaccaggaatgagtatctaatagcttttgtagaaccttccagaatatgtggggaaaaagggctattgctaagtgagctttatctaatatcctcctaagagttttactagtgcttttttgaggaattacagggaagctcctggaattgtacatggatatctttatccctagggggaaatcaaggagctgggcacccctaattctttatggaagtgtttaaaactattttaattttattacaagtattactagagtagtggttctactctaagatttcaaaagtgcatttaaaatcatacatgttcccgcctgcaaatatattgttattttggtggagaaaaaaaatagtatattctacataaaaaattaaagatattaactaagagaaatgtcctactttattatcttaatgttcagacatcatgagatttattatttttttgaaaaatatattgaaccattgaggaacctttatgatgtatcacagaaatcttcatagattctaactagatggaaaaagagctctatttatttgtgttcctaggcttaatgagaattctgggcttagaacatcaacgattaatacccagaattctttgttttgagaatattatggagaatgctctaaaaatctagggtaaagatctaaattcaaattttaaatatatatttatatttaagaaataggaaaggcaaagttgaactcacaatttgacatttatttttagtgttatttatttcataacttataaaatatttaatatatacatacacactcttcttttttctctgtacaaagtggttttaatatcagctttcaaaactgatcttataaaatgtaaatctaaattgtaaaatagttaagttttaacagtccctcccaaactttgtgttgattattcacttgctaaagagatgtgaggaatcagccttcagttttttggcagtagtatattttggaagtgaagaaattggaacacctgtttctaatttggtcttcatcattaaagacaaaaccaaaacactccaggcagtactgtttatagtgctgagccaggtagcacacagacatagtagcctaaaggctcacataattcgcatgctcaggccagggcagggtaaaaatagccttctgcttctttcaacccagtatcaggaagcactaccccagtgttattatttgttttgtcaaggtaagtctaaataaacaagaaaaacttcttcggaaggcatggcgaagggagtattttaaatgaaaatgattacagaatttgaattagcatgcatctctttgtgtgcaacagtaatccaagaatgtatatgttaccactacaaccatttgtttctaatagttttttcatgttatataacataaatgtatccacaaccttaattaagaactattcttcccccaaaatcatagtcctagtgtcaagaaacatactccagtgtttattgtaaaataacaaccacaccctcacattgaaaaaagtgaatgtctagagctgatataaaaaaaattctttaataaggngnctcgaaccttttcagaataatctgtaatgaaaactcatgcttaaaaatttaatggaaaagactgagccccaaattttgaatagtgattatgccttacttgaagtgctaataaaggtaggagagtacatttgttggaataacagaaatggtgatttcagcctaaaagtttctgagggtaaaggatcacatgaccttcaggaaactctctgcctcctgtaggtgctttcctatctcccccatccttccctaccccttttcccttttccttcctctctttttctctcactgtcactctgtctacacacactggcatcttttgaacactaaaagtaagcactgttttttaaaaaagtaattatttgttggatcagatacttttatcccaagtgaataccttcactgagatgtggccaatgcaatagtttcacagtaaaaacagtgcctataagaaaatagatcacatactatttttcaatgatattaagtgtattttgtaactattttcatttggtccttgtaacatgaaataatacatggaacttacctttataataaaaatggagtgccctggttcatcatagaggtgcatctagtttgcccttaatggaagtatacttgctgtgtggattgatagcaccttcttgaaatggaggagctcagctggcctcatggatgtgcaatttttgcagtcccacagggccttgcatacagaagcaccccgagctcagttgaatgtctgtttgattttttcttatttatttttttgagacacagttccactttgtctttttgtcacccaggatggagttcagtggcacaaacatggctcactgtagcctcgacctccctggctgaagggatcctcccacctcagcctcccaagtaaccgagactacaggcatgtgccagcatgtccagctaatttttgtattttttgtagagacagggtttcaccatgttgcccaggctggtctcaaactcctgggctcaagcgatctgcccacctctgcctcccaaagtgctgggattaaaggcataagccaccatgtccaactgaaattcttaataattaataatttttgagcaagaggtccacactttcattttgcactgggttcccaaacaggtcctgggtaggaaggatggctgaggataaaacaggagttgctttggcctggctgaacatttgaaccaatgatcagagtttcattttatgattgtgttactctgaacagatttgctatttttttccagctacatttagagttcctcatgtatatatcacccctctttttccagtccatctaacctctccttttttttgtgcctagaatcagttctccttgccttcaaaatccctgataagtgtccatttctttttgtatcctttgatgtagaagccacaagaatggctttagcagcttattttaatcttatgaattattcattcaggattttttaaatgattcagatgctttcaatctgttaacagtatttataaaacatgtttcagtgatacaacataggtgaactaaaccaaagatgcaaatgccttggaggaaaagaaattgtattatagagaatcctgagatatatccttttgggttgtttaatttaaagcctatcacaaaacaaagagaattgtcgcactttaattccaacctcctgcagtacttcacaacccttagcataagattctgaaatttgtaataggtggtacctagtttgatgcagggttttgcagcagttgtgcgaatgcctctgcgcaacggcctttcagtcagactaaatgagaaaatccaaactgtcctatcaaaactgacccacaataactgtactctgaggcgaaacagagcaaatgtgggtttcctgttttcattgtaaaacattccaggttctcagattgaagagctacattcagctgatagttgacatctgttccctcacacgtagtggctctcaacacgggctgcactttggaatcacctgaggacctttcggaatcttcggttgaatcatcctggctgtcctggtgatgcttcttatgtgcagctaggctggagaaccactacagggctgacacctggaatgggagcttgtaacttttacaaaataatagatgtttatcatcttttgcaatttttacttttaagtctatactaaaatgagccaaagaagtcttaacaatgatgtatggcacaattggttggttgaggctatcattccatgattacaaataggtggttatgtggggtggttttgcacttgtggcaattggactgcaatttggccttaaaatgacacaattcctcgttctcagatggagaggaattgccttgaaatttgcatgtaccagactaagtgccagtatatatatgactgatattttcgtgactcatagaaggtgtccatggtatagagtttatgcctacatctctatctttattttgggcacacatgagcttttgttaattatttctttgtacttgttagaatctgtttttgaaaaaaaaaaaaacttttgctttgatttgtggtggattcaccttcttaaaataataaatttagaggatattaggaatgacattcaaaacaaatatagtgagaggtgattttttaaaaatttttgttcctggtttccaaattatgtttactttgatttgattatatgttggtatctcccaaatataggttaacttagctatttaaatggtatcttttgacatttaaaaagaattaagtacctgtcaaatcttgcattgaggttgcagttgaataagataaaagcttaggatgtcaaaaaataatatagagaaatattataagattttatgattattcttgaagtttttgatgcaaaaggaaaatatgctgaatagttcttccaaaaaatattatttccctcaatattttatttgtagccatgtaatttaaagagaacagaaaataactgcaatcaaaagtatggtttaatatcaatcaaagtggcacaacagaattgataagatctttataacaatcaattggctgatattaaaatattgattttaattgatcttttcaattaaaatctttagggcctgtaactcataaaatcagcatccaccacaatatatggtcattattggtttgtaagcatagatcaccattgactcctacctggagagacatgtctatttctaaaaatccagtagtttctttgcattctcagtagtacacgttgtatatatatatatgtaacaaatttggtagttttcagtatgtgtgatgtcctttgggggttatttatcttgctggtccataggaggggtacactaccccaagaatcaagacatctgagttctagttctagttctagctctgccactgaagagccaccttacctggggcaagttagccattgtctcccagtcatgtttaccacccatgaaaggactcgtcggtttgatgtttccattaagctcaatgagtaactctaatagttactcttgaatctggattgaaaaacaccatgcatctgatgagataattcataaatgttgccccttttttaaatgatacaaccctaaaagtgactgaattgcccaagtgcttgaacatggcagaggtagttactcttattttgcagtttgtgcacttaaaaattcctacagtgattgttactttactggggaaaaaagatgaggtgaaacttcctcccaaggaattaaaatatctgtagaagccatggcttgcttttataatgtggaaatcatttgatttgctgtaattcacgcagatccctccttttgtcagggggaaatgatttgcatcatgttcttttttcataatgcttttacttcctgtttggatcagttgtatgtaaatgtacatttttgttactttggctgtgcccgttagaatttatcttccataaagtatttctcccattgagtctaatgatgtatactttgcctaggtctttccaaaattaaatttatgtaaatgtctattttatataaaatatgattaaaataagtatgtctggtttcaatctc

SEQ ID NO: 1604 - DNA, 19866 bp, Homo sapiens
ggaataaagaactgtccagacagctcagatttacacaacaactatggggttttcttagttgatactggtaagtgaaattaaagagaaactgtactgctgagattagctaatacaatttatcaagcaaaatggaaggcaaataatcctcagaagtaaaattcactgggcttggcaggaagctcacactattgacagtcattatacctcggggctgtcatttctctagatcttcaagctcgattcagtaaaatctggccattctcatactcatttctctatggaaaactccccaggggacaggaagtagccttatgatttaataagtcccaatcttctttgaatattatttatatatatttataaatccatgatgatgaaatgtttctctacaatgatgcaaaacctgcctctgaaagcagttactggcagatggtaaatacttttctataacatattttttaaaagcctccagaattgttccatcattccttccttgatgtacattagaaactgcattattaaaattgatacaatgctcttatatgacaggtgctatataaaatacacttactttatcttacttaatgcaaaacattactgggcatgaattctcttttctttatgacttatgtagtgcctctgtactgttggcatgcaatgtaagtaatgaaattatatttaaatgtaaggccaaagcaccactttgttcttgttgattactagactagctgccctgcagcaaaatttagtttaattagtttttcaatatgaaatgcttaaaggggttttattttcaaggatatttggagctctcttgttttacagaatataaaatttacattctgatacatctaagaaacttaccttatttttgcctgtgtaaaattgttgtgtagtgccacctgctggttcattggccacataataataaactgtcttaaaaatataaaaactagaagaaacctctagttgggcaggtctaaccctcctccttttacttcaacaacagtcccaccccaccacacccctaaaaatgataactctgtgaccaccctatgacattgagcctctgcctccagagacagaggctcctagggacctcctagtcaaacttgtattcaaacagatacgcttgaaaagatttctgtgtagataatagacattccattctatttagaatttcacagtgttctaaagtgtagttactgaatatagtttcaccaggaagctactttgaagaaacctatcagagtagagggccttcattctgcttctggccttactctcacttgccttgggatctttatcaagtctgttgaatatctttgcactttagtgtctatatctgtaaagtggaaaatttttgtgtgtggttttttaaatatctcttaaatcctgataaacagctaaacagtatcaaaaggcagctaaattgtataaaaaaatacctgcaaaaaccatacaaatgtaagtatttaaaaatatataatgcattggacaagtgcatggtggcattattatgttgtaagtcttattaattaagtgccattcaaatgaaagtgcatgattttaaaagagattttcactatagagctgatatgtgttatttaaagtaatgcttcaattgctatgttgaagtatagttcattgagacagacccttagaaattgcttctggacagttttatttctacagtagcctgttctattttttatataatgagagccagttatatcttggataaataacaatcactaataatctgaaggcatcctattagcaagagcgatgaccagaaaaatttcgactaaaataatatatataattaaaacaataggttttagtttttactgcttttttgttaatttttttggaagtatgaatgaacagtgaaattgttcaaagttaggcaatggccaggatgagaagctgaaatgcaagctaatttgcatattgaataattttggtataactctgtaataatgagaaagaattataagtcagaagagaaagtgaaatgttcatgtcttttataaaaaggcatgttctgctcttaccaacctgtcactggttacaggcttaccagaaaaggcagtggcccattaccagcaggccatcaaacttagccccagtcatcacgtggccatggtgaacttgggaagactctacaggtcactgggagagaacagcatggctgaagaatggtacaagcggtaaagttccctttcttttctttataagttgcccaggaacctcagcaatcactcatcagcttcttagttaatcagaataggtgtgctctcagaatactagcaaattttgccaattcaggtgatacaaatttttatctccaaagaaagcaaccacaatataaatgggatcataattcatgactttggcttgctggttagactatagtgctgaaccaaggttgaaatttaattcccactttagtcagtttgttgttttctgaagccatggattgcaaccccaatcataaacagcaatttaaaaaatgaggatacatgaaaaactatgcacacatgagaacaaattcatcataattaatgagaaagacccttggggctcagtttccatattgataggtcaataagacattcttacgttccaactatggcatcatgatcattttgtaaaaaccttgttcttggccaggtgcggtggctcatgcctgtaatcccagcactttgggaggccaagatggtcgaatcacctgaggtcagatgttcaagaccaacttggccaacatggtgaaacctcgtctctactaaaagtacaaaaattagccgggcatgatggcgggcacctgtaatccctgctactcaggaggctgaggcaggagaatcacttgaacctgggaggtggaggttgcatgagccaagattgtgccactgcactccagcctgggtgacagagtgagactctgtctcaaaaaaaaagaaaaagccaaaaaccttgttattgatataaaaacaaagaccgtattggagcagaggttcaaaccatggaccgtcttccctaaatctaagcctagacatttggaaatgtacctattagaagagaaatgtcatttagattttctccaaactcagcgccctgcaggtggcacacaaagctgagatattgtcacctttgggagcactgtattacaacactggccgatacgaagaggctttgcagatttaccaggaagctgcagcacttcagccttctcagagggagctccgcttggcactggtgagtaggatgaaagaaaatgaagctggcaacctaagcacaggcagccatagagagagctgtagtcctcacgcctcaaaactggagctggaatgccgtaatatatccactgtatgaatattcatacagctaatgttagagccattctctaaagacatggacaccaaaaatactgcatttttgttttgaaataacttcaaacttatgaaagtgttgcaagaatagtaaaaaatttacatataccctttcatccagctccaatgatttgtaacattttgattcatttatcactccattgtgtatgcatatgtagatgtatatgtacctacatgtatatgtgtgcatatttagatatgtatgtttgtatatacctattattagtgtgtgttatttttttcctgaaccatgtgggaattagttgtatatatcattcccctttatctctaaatacctttgcaaatagtttctaagaaggacattctctaacataaccacagtgtatttattagactcaggaaaattaacattcataccaacaaaatttttatttcagtgtttggaacttcactcatccttttccttagatgtgcaataaatcaaatttgttatcttgctgtaaacacactgttctgatgaaatcagaggaaattctttctcttctgacttatttggtcaaccttttttaaaagccacaagccatttcactggatatatttagtgtttctgccactcactcacaaatgcatgcacaaaactaaataaagaaacaaacagcaaaaagtcaaaacctgaaaactggtgattcagccttctctatgagtcactaaattgatgctgagcatgtttgtcaggagtgcgttctgaatgcttctattcagggatgctttatttgataaggtaatgaagtctctgctaagccaaggtccatgtggttttgtaggctcaggttttggccgtgatgggtcagacaaaagaagctgaaaagatgaccaatcacattgtgtcagaggagaccggatgccttgaatgctatcgcctcttgtcagccatctatagcaagcaggagaaccacgacaaggtaaagaaggacattgtttagagttctttggattcataggttaaacatggggtgcacctaagtgattctccagtttgcgtgtttataagcctgggaaatcttaaatcttatccgtcagcatatcctatctcttggaaacttttcacagatatccccttaacacctaagatgtccccttgtaataatatttttcttggcttatctttggtgtaaagcttttatgtggtattgtcttagtttgttttcagctaagtctataaagatcaagaccaacatttatatgctttattattttgtattttccttcttatatattgttttatgtaatcctcataacaaccatgctttacagggttgttatgaggattacataaaacaatatagaagaggaatatataggaagattacatgaaacaatatataagaaggaaacacagggtgacccaatgtcacaactgttattatctccattttaaaagtcacataatcagtaaatttataaactgactcaatgaagtaattgttgaaggcccactatgtcctggccactgtagtaggcatcagaaataaagtggtatgaaaaaaaaaaaaaaaaagtcactgcccttgtcttcatggagctaacccatagagaaggagattaaacaggtactcacaaaacaaatgtagagtgatagctgtgcccaggaatatcatgaagcgctacctctcccaaagagcatataatcaggggacccgatgagtctgggaggccaggtctccctgtaaagtgatgtggaggtgagggctggatgaagaataagagttgttaggcagaggaagaagcaaggaggattctgggcagggaaacgcacatgcaaagccctgtggcagcagtgaggggcctctctgaggaatgggagtgagggagcaggagcaccgtaggaacgcaagcacaggctgctgggaggagactccttggggccaggccaagggttttgttccttaccatgggagaagctttgggtttttgtggagaggaggaacatgatcagatatttgctttgaagggatctttggctgcagtggggtcagtgggtgctgggggcagaatggtcactaggacctgagaggggctggtggggtggtccagatgaacacatggtcagggaaaacgtctgatgccaaatcttgttttctttcaactgtatcacaccacctccctgtaaagtaatcaaggatattttattgccactcatcgatacgtgggaaaactggagtgtaagaaagttattttgtcagggccactaattcccagtgagaaaatcaaagataatgaagaatgtatatatatttgagacaaggtcttcctctgttgcccaggctggagtgcagtggcatgatctcacctcactacaaggtccacctcccagggctcaagagatcctcccatctcagcccccccagtagccgggattacaggtgtgcaccaccacacctggctaatttttgtatttttttgtagagacagggtttcaccatgttgcccagactgatctcgagctactgggcaatctgcccacttcaacctcccaaagtactaggattacagccattagccactacgcctgaccaagaattgtactttgattgtcacataccatacctgctgacacataggaacaaaaagtataaatttgatcagttaaataagtttttctttacctaatctgcatttattctgtcttaatttccaacctctgcaggcacttgatgctatagacaaggctctccagctgaaaccaaaggacccaaaagtcatttctgaactttttttcacaaaaggaaaccaattaagagagcagaaccttctcgacaaagcttttgaggtataaactcatcataaaattatatcatcaaattcacagattaaaattaattgtcttttgatctttaaggaaacatgtacagtaagatctaagatcactggcatgtatgtttatggagtgagtgagttttttttaactaattgacgaagttttgtttattttttatcattgagcatctggcccttgactgaatcagagttgcgcatttatttttctgaataatcatgtttaatttgatgttgacagcattccacattttggcctcaaactagcttctctctgtctgtgtctctgcctgcaagaccttctattccagctggactagtacctgaaaagccttggacattcccacatgtccttgaaatgccctctcttgacttggaggatgagatttccactcatccaccaagatacagtctttgtcctcctgccttaggaagccctccctaaccgtccttattccctgtgaccttacttcttctgaactcttaaaaagcatggactgtctcatgaaggtaccagtcgtttgaaagtgtcacatattacattgtattattaggtccgtcccctaacccccgtatgtgtgtgtgtgtgtctctgtgtgtgcaggcacgcacaaatccttgcatagtttatctccccagttagattggactttccttgtagagagggactgcatccttctctgttctaaaacaatgttttgcatcttacaaggtgttcagtatctatggttttggaataaaacttattcacaggttgaactcaagaagacataagtagaaatagaaatgttacaatgttacatactttctccttatatctggtaaagccacaaattattgaagtcataaaattatactaaatatattataggaaaagtaaaatctcaaatgatacaattgtgttgggaaataagtgagtggatttttaaatattattggaaaacacatggaaagatatttgggaaagctcatttgaatgtgaatcctttaatcaaaaacagaaattgtggcatttttctcagaatttgtaggattttctctgccttttcaacattttcaatatcgtcattcttaagttatttataacgaatgtgaacattattaataacttaattgtgaatatgtatgtgtgtgtgtgtatatatatatatatatggccattgattcataataacagctgaaatgtattatcactctgtgcatgattcatatgtattatgtaacttaatcttcacaagaatcctataagaaaggcatggtcattatcatcattttatagttttgtaaactcaggcttaaaggtcatatcttgctcaaagtcacagaagtgggtaagagacggtgtcagggtttgaatccaggtctcctacactacattcccatcttcactgatataaattaatccaagagacacacccttttggtttattttagcagctttttgaaggtatagtttcataacatttctttctttcccctaaaactgaagtagaggagaatggaccagattttatttgatggacctgtttggtcatattcttgctaatgaaaatagcaaggaacattaaaatatgtgcacaaatacttagctttgtaattaaaggcaatacccttaacctgtggctttatttcaggtgaccacttgagactcagtggtgagcacacctttgatacaaaacatgcataatgttaaaaatataccacacatcactgatactacatttaataggatacatgttattcagaccaaagaaagtgcttgagggataagtaactctctttaaacatttgaagacttttcatgtggcaggggaaaaaagactgtctaatgaataaaactatcccctagtaaagtagatgttcttaaagaggcggtgatccactttaagaatttcagcataggctgaacgactaggtcagttatattgtaaaaggggatactgcattagggttaaactgttcagaagactactccaaaattctgttattataaaaagaattttcttaccaattccatttgcagtgaaaaaaggccagaaagtacaattttcttgcaggtcaaggccagttaaaaatgatgtgatataatagaaatcacctgaattccctgcaggcatcctcagtctctctaagtccaaaggtcagctctgcagggaaattatacatttcagtttcctccactttagaatcatcaactttgaaaaataatagaaataagcagggtctcctgtgaactagtagcggctggtttcattgtattactactttaaattttcacacgtgaagaaagtggtttctgcaatcctggagtttggaggtttgtttcctaacctgaggatatttcttatttatttagagctatagagtggctgtgcaactaaacccagaccaagcacaggcctggatgaacatgggtggcatccaacacatcaaggtaggagaataattcactcccatgtggaccgggctttccccctgtgttttctctctctgtcttctttcttaaaggattgaggaactattgttaatttcctttttgaaatcatttgaatatcaaaagtatggcagtttaaaagtgaaatagctcagtttatgttcattttgcattatctagatactgaatatcctgaagctattttaaaaataaatctgtataaattagattttatgatttttctaaccatgaagaaaatcatatgtacctaatggaagtatcccacagcaggtaaaatctgtttatgggaactaaatcgttgttcaagctcagtagctcagtatagcttaatttcttcccagtttaactcactgtcaagattaaagtgttacttagaatattacttcctatttcttatgtctaatataccttttctccctaattttttactggaaagcaaacttgtttgttttgctttgttttgtttttccaaaggaaaaacactacctttgggtgagtcttcccaaagattgaaaatgacctttgggggactattatctgtaactaatgcaatgaacgattcgccatcattcatttattcattcatccattcattttataagcatttatggcgaacatcctatgtgtcatatcccctgctaggcactgggaatacagtaatgaaccaagaagacaaaaattcctgttcttatggtgctagtaggaggagatatattaatacaaggaggaggaggaggagatatattaatacaaggaggaggaggagttgatatattaatacaaacatacatacatgaatgtttaatgcatgcatatgtgcatatgtatatgtataaaatatattagctggtgataagtgctaaggagaaaaaagagaaagaagattggaatgccaggcaataagggctaaagttttaaattcaggtggttaggaaaggcctcagttacaaagtagtatttgagaagagacctgaaggagtgagccatgtggcgaaatagggaaagagcacaagcacgtgcagaggccctaaggtttgagcacgcctgttgtttaaagtgaggaggcagcgtggcaaggagagagcaaagaaaaggaaatgggagaagctagggtcagagagggtgcagggtcagatcatgcagccttcaaggagtttgtagggacttgggcttttatgccaaatgagtcagggtttttggaggactttgagcagagaaatgccatgatccaacatgtttttaaagaaccacccttgcttagctaactgattttcagtctctgcactgataaaatagcagtgtagtgattaaaatttgaacaaagtcctaacgggttttactgttaagtggaaactgatcactcttggaaacacacacaaaaaagatgacctacgattacacaaatgggaggggttaatgggataattaccctgcagctgacagctttgatctggtaggtggtgaattcaagcacgatatttttcagagccaaattgcccaagctctgatcttaatgatattctagggtgtccagtagtatctagctgggaaacatagaatgaacttactttaaaagagtaaaacgataattttaaatatttttaatcatatgttaaatagttacattttcaaatacagtcatgtgccacatgacatcattttggtccaagatggatcatatatatgatgatgtctcatggtctcataagattataataccgtgtttttactacatcttttttgtgtttcagtatgtctagatacacaaataccactgcgttaccattgcctacagtattcagtacactaatatgctgtacaggtttgtggtctcgaatccataggctatatcatatagtctaggtgtgtagtagtaaactatttcatctaggtttatgtggctatatcctatgatgtttgccaaaaggaaaatcacctaatgacgcctttctcagaaggtatctttgtcattaagtgacaaacaactgcaatgtgctcaatatgttttcagatggagtatatctgcagctaaaataatgggtatagttgttaattagaaaaagtacaacaaatatactcaaaagtgtccaagaagtctggaaatagagaaaatagtatgtctactgcactctttaccaggtgaacccattgctttaaattaggaagtacttcccttgggaaagtgtctagagattaaagaaggatctattgactacattattttaaaatataattagtgctgagtaaaaattagtttatcctgttttttgtctttgtggacatcatgtactaggctgaccaatataaaattgccacctttgcagttttaaagtggtcaaatatcagttaatttatgtgattcaatctaatgtaaatatataaacaggcacatggctcagatgtggtcattttgatgccactattagaatgcagagttgtccttatgaagcctaaaagataattatgaactttctgtgtcttttccattgccaggtcatgtgtgcatcgggcattgttacccattcctaggcctcgctccttccccaaacctgggggaagcttaggcaggcctgagagctccagcaaggttgagagttagaatagtactttgcaaggaggttgcagaaagagatgggggagagaggagcaaatgtcatagttgtctcttgctcatgacacttggttataaaaagtaacgcttcttatgaagttttacatataagatgaagtgagtggaccaagaaattataatacattttttatcatcaaagagttgcatcaaccaggctatagcacaaagtctgattttcagtactgcctcatgacagtaaatatgcattttctagaatggtgctgtccagcagaacttttgtgacaatggaaatattcagtagctgccctgtccgaggcagtagccactagctacacatggctactgagcacttgaaatatggctggtgcaactgagaaactgaatttttaattaattgtaactaatttaaattggaaaagccacttgtgactagtggccatcaagtgaacacagttctggaaactggataattcagatttttttacctagcatctagggaattggagatactgacttaaaggatataattattttttaaaatagggcttctaggctgggcacggtggctcatacctgtaatcccagccctttgggattccgaggcaggcagatcacctgaggtcgggggtttgagaacagcctggccaacatggtgaaaccctttgtctactacaaaaatacaaaaattagccgggcatgttgtggtgcacgcctgtagtcccagctactcgggaggctgaggcacgagaactgtttgaacccgggaggcagaggttacagtgaactgacattgcaccactgcactccagcctgggctacagagaaaaaaaaaatacagcttctagtttagtgaagaaaagggcaatttgagggagagaaaaggaactgcgttctgtgtgaaaggacagagaagcctggtgatcagagaataagatcccaaggcacttcactggggctgacattcagggagcctcctggaagaatcatttcaaaagcaattgcagtcaaaacagattttgagagcactcttagacccagaaatgtatagttgtctgcatgtaagtgctaaggctaataaaaatcagaagacatttggaagacatatccttgaattgaaaaaaataataattgaatatagcaaatgcaagttcccacttgttcagcaatctgtttaacttcttatcagagtcattgttaatacttccttttgttgtacatgccagtgcctggatatctaacgtacaatttcttgtgctgtcatttccactttccttttcaccaatatgaccagtaaatacagtaagaaatagacactattgatacagagcctggatagtcattaataacagtaatgttagtatcgtattgagcactcactatgtgtctaagcttttgacaggtatttggaagataggtaagcactggataagtattagttgtttgttgctacatggtgtcttcactctaagagatacaatttttaattgtgatggaaatgtagagggtcactggtgtttatccacatgggagctataactaagaatagatggaacaaattcatactttttctaatgggggaactccaacaatcttagctctgagaatttgcagaatacagatctaaaagagggtggaacgaataagggaggtaatacatccagaagcagaaaaaatgctgaaaaaagctaatagctgtgactgagttgccagggaccccttctgggaccaggcacacatggttgctagttgaagaatcaaacaaaacagttggaagccaacagagggtggggacagttgtgtttagtaggtcaggagtcacataccatactgcactaaaagtatatagctaatgcatactgctgcaaacctgcagtagtaaaaaatttgacttcacattcttatcaagtcttttcattgcaaaaaactttattaggcaaaagttacttttacgttttaagctgaagactagaataactgctatcactaaacagagagagtggatacataaactatttaatcattcttcttgcagttttaaaaacattttctcatctctcattctcccatcccctccaccccattcccctaacatgaattttgtgccatggttccattttacaaggaacagtactagccccctgaggacaccaggaaatggtaacctcacaccctgcattagtagaattgaaaatctgtttttctgccatttatccttacagtataactctcctctttcacattctgcaactgatctagtgcttaaaacaaatggagtcttcaaaagcaccaatagacaaggataaaattacacatacagacagagtttccatatgagaacattaatgtaaaactgggcagagggtcagtttcttagtctcttcattctctgagagagttttgtgatggatcagaatgtaattgctccctctttcccacccccagggaaaatatgtgtctgcaagagcttattatgagagagccttacagctggttccagacagcaaactgctgaaggaaaatcttgccaaattggatcgcctagaaaaacgattacaagaagttcgagaaaaggatcaaacatagcaccaccgtctgacccaacctcataggataatgtggtgcctctgaaaggggagtgatggaagccttgctttcacatcagcaggggcacaactaatgagattttctctcattccgagttcagggtgacacattttgggacatctgctggtagcccagtgctgaaggacttgcttttccatgaagaagacgaaaacagcaaacaagggcaagaaggtctgagagggaaggagaatgacatttacacattttacagatttttgtttggtttaactccagatttctcttgatatatctctgtgcttttgagacctggagatctaattctgtttagacattttttgtcccagaaatacagaagcttgaaatgctatgaaggcagagcttctattctttatgggatgaaatatttcaaaagaggataaatcctctgtggtaagccatttggaaaatcctaccaagaattggcttatttaattttccagaaccaggaatgagtatctaatagcttttgtagaaccttccagaatatgtggggaaaaagggctattgctaagtgagctttatctaatatcctcctaagagttttactagtgcttttttgaggaattacagggaagctcctggaattgtacatggatatctttatccctagggggaaatcaaggagctgggcacccctaattctttatggaagtgtttaaaactattttaattttattacaagtattactagagtggtggttctactctaagatttcaaaagtgcatttaaaatcatacatgttcccgcctgcaaatatattgttattttggtggagaaaaaaatagtatattctacataaaaaattaaagatattaactaagagaaatgtcctactttattatcttaatgttcagacatcatgagatttattatttttttgaaaaatatattgaaccattgaggaacctttatgatgtatcacagaaatcttcatagattctaactagatggaaaaagagctctatttatttgtgttcctaggcttaatgagaattctgggcttagaacatcaacgattaatacccagaattctttgttttgagaatattatggagaatgctctaaaaatctagggtaaagatctaaattcaaattttaaatatatatttatatttaagaaataggaaaggcaaagttgaactcacaatttgacatttatttttagtgttatttatttcataacttataaaatatttaatatatacatacacactcttcttttttctctgtacaaagtggttttaatatcagctttcaaaactgatcttataaaatgtaaatctaaattgtaaaatagttaagttttaacagtccctcccaaactttgtgttgattattcacttgctaaagagatgtgaggaatcagccttcagttttttggcagtagtatattttggaagtgaagaaattggaacacctgtttctaatttggtcttcatcattagagacaaaaccaaaacactccaggcagtactgtttatagtgctgagccaggtagcacacagacatagtagcctaaaggctcacataattcgcatgctcaggccagggcagggtaaaaatagccttctgcttctttcaacccagtatcaggaagcactaccccagtgttattatttgttttgtcaaggtaagtctaaataaacaagaaaaacttcttcggaaggcatggcgaagggagtattttaaatgaaaatgattacagaatttgaattagcatgcatctctttgtgtgcaacagtaatccaagaatgtatatgttaccactacaaccatttgtttctaatagttttttcatgttatataacataaatgtatccacaaccttaattaagaactattcttcccccaaaatcatagtcctagtgtcaagaaacatactccagtgtttattgtaaaataacaaccacaccctcaaattgaaaaaagtgaatgtctaggactttattacaacttttcagaataatctgtaatgaaaactcatgcttaaaaatttaatggaaaagactgagccccaaattttgaatagtgattacgccttacttgaagtgctaataaaggtaggagagtacatttgttggaataacagaaatggtgatttcagcctaaaagtttctgagggtaaaggatcacatgaccttcaggaaactctctgcctcctgtaggtgctttcctatctcccccatccttccctaccccttttcccttttccttcctctctttttctctcactgtcactctgtctacacacactggcatcttttgaacactaaaagtaagcactgttttttaaaaaagtaattatttgttggatcagatacttttatcccaagtgaataccttcactgagatgtggccaatgcaatagtttcacagtaaaaacagtgcctataagaaaatagatcacatactatttttcaatgatattaagtgtattttgtaactattttcatttggtccttgtaacatgaaataatacatggaacttacctttataataaaaatggagtgccctggttcatcatagaggtgcatctagtttgcccttaatggaagtatacttgctgtgtggattgatagcaccttcttgaaatggaggagctcagctggcctcatggatgtgcaatttttgcagtcccacagggccttgcatacagaagcaccccgagctcagttgaatgtctgtttgattttttcttatttatttttttgagacacagttccactttgtctttttgtcacccaggatggagttcagtggcacaaacatggctcactgtagcctcgacctccctggctgaagggatcctcccacctcagcctcccaagtaaccgagactacaggcatatgccagcatgtccagctaatttttgtattttttgtagagacagggtttcaccatgttgcccaggctggtctcaaactcctgggctcaagcgatctgcccacctctgcctcccaaagtgctgggattaaaggcataagccaccatgtccaactgaaattcttaataattaataatttttgagcaagaggtccacactttcattttgcactgggttcccaaacaggtcctgggtaggaaggatggctgaggataaaacaggagttgctttggcctggctgaacatttgaaccaatgatcagagtttcattttatgattgtgttactctgaacagatttgctatttttttccagctacatttagagttcctcatgtatatatcacccctctttttccagtccatctaacctctccttttttttgtgcctagaatcagttctccttgccttcaaaatccctgataagtgtccatttctttttgtatcctttgatgtagaagccacaagaatggctttagcagcttattttaatcttatgaattattcattcaggattttttaaatgattcagatgctttcaatctgttaacagtatttataaaacatgtttcagtgatacaacataggtgaactaaaccaaagatgcaaatgccttggaggaaaagaaattgtattatagagaatcctgagatatatccttttgggttgtttaatttaaagcctatcacaaaacaaagagaattgtcgcactttaattccaacctcctgcagtacttcacaacccttagcataagattctgaaatttgtaataggtggtacctagtttgatgcagggttttgcagcagttgtgcgaatgcctctgcgcaacggcctttcagtcagactaaatgagaaaatccaaactgtcctatcaaaactgacccacaataactgtactctgaggcgaaacagagcaaatgtgggtttcctgttttcattgtaaaacattccaggttctcagattgaagagctacattcagctgatagttgacatctgttccctcacacgtagtggctctcaacacgggctgcactttggaatcacctgaggacctttcggaatcttcggttgaatcatcctggctgtcctggtgatgcttcttatgtgcagctaggctggagaaccactacagggctgacacctggaatgggagcttgtaacttttacaaaataatagatgtttatcatcttttgcaatttttacttttaagtctatactaaaatgagccaaagaagtcttaacaatgatgtatggcacaattggttggttgaggctatcattccatgattacaaataggtggttatgtggggtggttttgcacttgtggcaattggactgcaatttggccttaaaatgacacaattcctcgttctcagatggagaggaattgccttgaaatttgcatgtaccagactaagtgccagtatatatatgactgatattttcgtgactcatagaaggtgtccatggtatagagtttatgcctacatctctatctttattttgggcacacatgagcttttgttaattatttctttgtacttgttagaatctgtttttgaaaaaaaaaaaaacttttgctttgatttgtggtggattcaccttcttaaaataataaatttagaggatattaggaatgacattcaaaacaaatatagtgagaggtgattttttaaaaatttttgttcctggtttccaaattatgtttactttgatttgattatatgttggtatctcccaaatataggttaacttagctatttaaatggtatcttttgacatttaaaaagaattaagtacctgtcaaatctagcattgaggttgcagttgaataagataaaagcttaggatgtcaaaaaataatatagagaaatattataagattttatgattattcttgacgtttttgatgcaaaaggaaaatatgctgaatagttcttccaaaaaatattatttccctcaatattttatttgtagccatgtaatttaaagagaacagaaaataactgcaatcaaaagtatggtttaatatcaatcaaagtggcacaacagaattgataagatctttataacaatcaattggctgatattaaaatattgattttaattgatcttttcaattaaaatctttagggcctgtaactcataaaatcagcatccaccacaatatatggtcattattggtttgtaagcatagatcaccattgactcctacctggagagacatgtctatttctaaaaatccagtagtttctttgcattctcagtagtacacgttgtatatatatatatgtaacaaatttggtagttttcagtatgtgtgatgtcctttgggggttatttatcttgctggtccataggaggggtacactaccccaagaatcaagacatctgagttctagttctagttctagctctgccactgaagagccaccttacctggggcaagttagccattgtctcccagtcatgtttaccacccatgaaaggactcgtcggtttgatgtttccattaagctcaatgagtaactctaatagttactcttgaatctggattgaaaaacaccatgcatctgatgagataattcataaatgttgccccttttttaaatgatacaaccctaaaagtgactgaattgcccaagtgcttgaacatggcagaggtagttactcctattttgcagtttgtgcacttaaaaattcctacagtgattgttactttactggggaaaaaagatgaggtgaaacttcctcccaaggaattaaaatatctgtagaagccatggcttgcttttataatgtggaaatcatttgatttgctgtaattcacgcagatccctccttttgtcagggggaaatgatttgcatcatgttcttttttcataatgcttttacttcctgtttggatcagttgtatgtaaatgtacatttttgttactttggctgtgcccgttagaatttatcttccataaagtatttctcccattgagtctaatgatgtatactttgcctaggtctttccaaaattaaatttatgtaaatgtctattttatataaaatatgattaaaataagtatgtctggtttcaatctc

SEQ ID NO: 1605 - DNA, 7173 bp, Homo sapiens
aatgtgtttgtatgttttttttttaggagatcatgaatcagacagataaaaatcaacaagaaatcccatcataccttaatgatgaaccaccagaaggtaagtatgcatctgtaacactaagaatggaaaaatatactgaattaaagttctgatagtttttattttttacttattttattttatttttttttgagacagagtcttactctgtcaacccaggctggagtgcaatggcacgatcttggcccactgcaacctccgcttcctgggttcaagcagttctcctgcctcagcctcccaagtagctgggattacaggtacctgccaccacacctggctaattttttgtatttttagtagagacaggggtttcatcatgctggccagggtggtcttgaactcctgaccttagttgatccacctgcctcggcctcccaaagtgctgggattataggcgtgagccaccactcccagccctgattgtttttattaaagaaatataacctgtttaccttgtcagtaaatatgtccccaaaataattgaagataacatttttagcttctaataagaaagcatagatagtggtgaatagggacacaattttaccatataaggcataatattttgctgtcattcttcttttaagaccattttagaagtataagtatcctttcatttgtaaagggtgaggatggatacagaggaaggatggactgtgtttagttttgatatcctgcatacaaaatcagcctaatgcaagaggcattagagatctgttgttaaactcctattattcattatattgtaattggtacctctcctctattaacacatgatcttgggatctgcttcatttgtctttttaagtcataattctctttgagtttgaaaattgtgttatcatgaatcattttaattcttcagaaacccttggaaacacacctgaatgtcctgagtacatacagaaaatgactagaggcatgtttttggtatagactgttactaaacttaatccaaatagtgatctccttggagaattgcatgttgattactagggctggaggttgtgactctaggtattatatattttttcctagttctgttacccattgtctaaaattttcttcctatatttcttttattggtaggcaaaaatgaaattgctaggaaaatagcaacaaagggtttacacttaagccataaagaattcaaaagaactatcggagattgcagtgagctaagatcgtgccactgaacttcagcctgggcgacagagtgagactccgtctcaaaaaaaaaaaaaagaactagctgattaggtttagtttagtttggtggaggaatagcctggaaaattactaactcaggtcttttccatgccttacatttttaggtctggaaccatggagttttgaaaagttagggctcagtgagaaagttaacaaggactttgtgagaaagaaatcagaaaagggataaataaaggccatccaggggcatgattgtcaaggaagagaacaaagcagaatgtctttctatgccaaccactaaacaagaggaatctgcaaagcagataatttatatggtgataattaagagtatactgtaataaaagagatcagctgcattaattatttatctgacttgattaagaacaattatttgtcttctttaaatgcatgtgtaccaaatttggcatggcaagatagttttactaatgagatatttggcatgaggcagttatctgttgtagcctcaaatcaggattttgccttttttcttagggctagtgacctcgattacagaattaccaattatgtaatcctttccatcataattttataactaatatattcaaatgcccatctatatattaagtcttttacttcagtcattaaaaatttgtattaactatacttattaagtagttttaataaaaatatttggtttttaaagtttatagctattgctgtatctgtatttatgcactattttgcaaagatattttgactagtcagtgagattttcccacttgtgataaaatgtaaaatcttcagacaatgaaaagaaaaattatctcaaggtaaatttgtgccttgtgcattggaaagctcagttttcagaattttttattttctccatcaaatattgtcagtttccccatgataccttctctgagaacttgattctgctagaatctaatagttttggtgctcttagttggacttacgtacccagtaatttacccctctttttcagaagtaaagcttgaattgtgtaagtaccaaatatttttccatgaagtttagaaaaacactaatgcttatgtgttgttgctgcttaaattattaggttactaggccgggcgcagtggctcacgcctgtaatcccagcactttgggaggccgaggtgggttgatcacgaggtcaggagattgagaccatcctgactaacacggtgaaaccctgtctctactaaaaatacaaaaaattagccgggtgtggtggtgggcacctgtaatcccagctactcaggaggctgaggcaggaaaatggcgtgaacccaggaggcggagcttgcagtgagccaagatcacgccactgcactccagcctgggtgacagagcaagactctgtctcaaaaaaaaaaaaaaaaatattagattactaaagagaaaagacctgtgttcactgtgttcattttaagctagtgcaaatttttatgaaatctttctgctagtcattttattcctaagtttgagcttacatgctaatatatgtggctctatttaaaaaaaaaaaacaaagaaaataaactcatgacttagagcttaatttttcatattgctattgccttttatgggggatatctctagtttttaaaaactagatacttaaagcacacactctctttcataagaattactgaggcagtaattttaagtgttaaccatatctatagtttctctatcctacttatgtctgaataaaaatgattttttaggtagataacacgattttaaatgatgaatagttttttacttttacatagtattagctctttaaatacgtcagtaagggagacatagagcagagacccaaatgtatttacttaataggggttcttaaactttttggtttcaggatgcctttacaatgtcaaaaattgaggccccaaagagctgtgtctttgtcaatatttaccatattagcaataaaaactgagaaatttgaatattttatgcattaaaagaacccatattaacataattaaaatatttttatgaatagtaattctttcaaaacaaaaaaaattgtggaaattgtgagcaaggtgatactggtttatacattttagcaaatctctttaatgtttggattaatgcaagacagctacattcttgcagctgcttctgcattcagtctgttgtattatacatcattctgcttctggaaaactgctatagactcatgacagaaagtgaaaagacaaatgatattttaataatattatgaaaatagtttttaccttgtagaccccctgaaatggtcttcggcatctgtagtggtcccagaccataccttgaaaactactgcattttacgaagaagattgtttcggtaatgactgattaaatcctatcaaggaaatgaaggccaaatgtagttatctttttattttttcatgttccttttaggatgtaaaataaaggttatttgttaacaaaaccgtaaaccaaggaaacatttaaaataggattctgttttacaaaagttgtctagtctctaaagcatttcttctcatagatactaagacttagcattggaccaagatattgtaaaaacatgtacaactataccctgaaggaagagctcttcagtgtctttgaatcagtgtggttggccttatcaaatcaacctcctgttgtgaggaagtcttaggttacttaatgatgtgtactgctcttttaaagacttgtgacttatatttgattgtctcatgatattttctctcattaggttcaatgaaagatcacccacagcagcagccaggcatgttgtcccgtgtgactgggggtatcttcagtgttacaaagggagctgttggtgccaccattggtggtgtggcttggattggtggaaagagtctggaagtgaccaaaacagctgttacaactgtgccttccatgggaatagggctggtgaaagggggtgtctctgctgtggctggaggtgttacagctgttgggtctgctgttgtaaacaaagtgcccttaacaggaaagaagaaagacaaatctgactgaaatatagagatacacttgcgctccacagcactgtaatgccagtggcattgaattgctaaattatggactacaaccaagtcaactgttttggacgtttatcttctaaactgctgtgttgaaagtattgatgactggctttcatctaaaaagaagagaccaatacgagcacagtatatgaaggtttctcatacttaagttccaggtttttatctggtaaaatgttacacttactcggttgtaactgaagatatggtatgtttgaatatttactataagtctttcagtttgactaaaaatgtgaaagttgaatttagtagatgatcttcacagttccatatgtataatgtgccaggtaactcacctgccccttaagaagggaaccttgaattacataagccgtacctttgatgtgcctaatagtttcagatgtcttagttttttataaccatagttgattaggccaagaggcattcatttcttatttaagctggcaaaattagcaggaattagagaagtttaaaaagataaatggttttatgataatgttaaccatcttttgttagtaaatatgcgttctattattttaatcattgatgccttacaaaagaaaacatcttttctaataccctgaatatgtgctgttcttagaatcatctatggattcttttaaaggttgtttgtgaaattagttttccctttttagaatctcaggagtagtggggtaaagacatttcctgctgtcagtggataagacagagcttgttaactgttttggcagtagttaaaatcaaattgtacacttctcagcctgggttcatgcttcatcattaatacacctcacagtgcctaaggaacatttacttactggtcagaaggtattttggaagagtttcatattaaggaggaacaaataataattttaagttcttaaaaattacctaaaacaccccaaatataaaaagaagccttcacacctattctgtctttaggatgtcttaaattattagcagtactccttttttaaaaacactgtaaaagtaaccacaaatatgtgaggacttactattttaaatggaatggaatgagctccatagattagttttgaatataaagtatataaaagtgcatcagtggtttatataggctttaaaaacatgttatcttacagtcctttaaagcagccatagagtttgtatcatttttcaagccaatttcagtcagggatttgaattgtttgattatggatgataaatgtgtcatatcttattaatatgtctcatgtctcgttccttcttaatatgatttagctggaattcattttcttttcgtttcatgtttaatttcataaaacgtttaacaattggcatatatacttggcattcctgtccaccaaggattgtaatccaagcctgggaaaatcttaaatttctttttacttaaatctggaaatttgtctccattctgccacctttttttttttttttttttatagtggaggggaggaaaggggggtgataccttgcagtaagtaagtcgaaatagcatgcctgaaaatttgaaacagaccattctaacacccaaggcttgtttataaaatacttgagaattacattaatgtggaatcaacagatgcagaagaatataacataacttttaaaagctttcataaataccagcagcaattgtaagcaaatctacaaaggttcttgaacctttctattatatacaaaactgaaaagtcattaaggagttcaactaatcaggaattaaatggtcatttatttcatgcagtatgatttaaggtatttcttgagattctggtcaaatgtcataatcagcaaacgggattaaaaaaaaaactccaaaatcactaaataattatctaaataatggtattggagaacttgtttcctgctatttggaagagattgttgcttcattgctagtttgtatttctaacttctacagttatagactccactgtgctttgtgtctgaatttctcagtatagacattttgtttactgtatgcttgcatatttattttcaactttgtttgtctttaaaattgcttgaggaaaaatggttgtaattaatttctgctacagaaaagccacctggtacgttttgtctcatcaggattgttttaaattctaaactataagtttgttcagaggggcttttgcaatgatagcagaaaactgtacaaatgtacagttagttatagaggttcttgttgaaatgaacttaccatctgatgatatgtatgtacagctgtgtacttgagtcttttttagtttacttagaaagactagcagtttgacctgttaaacaggactagttcaagtcaagaaactaaggttgttgtatacacctggaggcatctgttattcagcttatcctttgagtgggtatttggcacaatgaggataaacttatgtgacccacttgaatggctgatctaataatgttgacattatgcattctgtacttagtgaaatgtcagatgaaaataactgatgaataatttttttgtattaaagggatgggaaaagaacacatgaatttgttaataaagcactatgatctgcaaacgatggaatgtttcataaagatctaaagaaataaaggaaactttaaaacagggtgatcttaccatttttagttactttgcagttcagaaagtgctgtagccagtttaaaattttttttatagtaatgtacaaacatatctttggatatgtattttgatgctgacacaaccatgaaatacaaatatattttaagcaactctaataataaagattaagagtgtagatttctaggttttaccccaacttgccaaatctctgcaaggtggggcccag

SEQ ID NO: 1606 - DNA, 39339 bp, Homo sapiens
ggggttagcatagtggagcggcaatatatccaggaccggattccctcctggactggagccggcttcgtccgagtgcctgaaggggcttatttggagtttttcattgacaacataccatattccatggagtacgacatcctaattcgctacgagccacaggtaaagaaaccacttagtggactggtggaggagggaggggagaatcagtagaaaaatagtacttctaatgggtattatatatagttatgaaatatggaggttgcattagaacagatcagattcctatagtctcacctcctccatggaagttaaaataaatgtaccattttctttctttcttttttttttttttttttgagtctcgctctgttgtccaggctggagtgcagtggtgccatctcggctcactgcaatctccgcctcccgggttcaagcgattctcctgcctcagcctcctgagtagctgggattacaggcatgcgccaccatgcccagctaatttttgtatttttaatagagacggggtttcgccatgttggccaggctgatcttgaactcctgacctcaggtgattcgcccgcctcagcctcccaaagtgctgggattacaggcgtgagccaccacacccagtcaaaacgtaccattttcttgaatccagtttctcaaacgtagtgatcttttgtgaggcactcaaccttgctgacgactgaggtggtgatgaggatgtatgagatcctctccttccctcacaacctggctgtgcagtgacagactgaagccccgaactgtaacgaaagactgaaggtgacggtgtaacagcagagagatgcatgatcctagaagatgggcatgcaccagccagcccgagccagggctaccaaaacgttttcctagagaatcagagctaggccttaaagtgtgaatggaattgtggaaagttggcacaaaagtaagaaatagtgtgagtggaagagagaagagagggttttgtttttattgagaatcattccacatagcttgatgagagatatggttggagatgctgttggcaaaaatactaggattagtaaaggaatttggactataatattcacaggaagctattgaagcatttcaagcaggggattgtcattatctgagctgctttaaagtggactgaaagggacattgggaagaggcagaaaacagttgagaggtgtttcagcatccagggcagaagggatttgggctggaaccaggggagtagcagaggtagtagtaaagagaaaagtgaagagcaactgtttgttttccatttcaacttggcaattgattgattcagagaggtctttttataaacaggcagtggtgggctaactatcttttcattgtttgtttcttattctagctacccgaccactgggaaaaagctgtcatcacagtgcagcgacctggaaggattccaaccagcagccgatgtggtaataccatccccgatgatgacaaccaggtggtgtcattatcaccaggctcaaggtcagtgtgacggtggtttggcagctcaacgggcttcatatgcaaattagtatttttctaatattttgcgagttttcaagtcaccatttcagagccagacgttgactgctgacttttttcctttggaattatcgatgcagagctttgtttttaatttttattttttggatgcatgaaggttgactttcgttgttgtctttcttttttgtttgggggcagatatgtcgtccttcctcggccggtgtgctttgagaagggaacaaactacacggtgaggttggagctgcctcagtacacctcctctgatagcgacgtggagagcccctacacgctgatcgattctgtaagtgcgagattgcttctggcatatgcaggaaagcctgggcggaaagtgcccagctgctctcagggtgttttgttgaggggtaatgctgaggccagcgtaagcagaatcattctttcttgcctccacggttactttgcttatactccaccccatggaaaggatttattccttctaaaaatataaaatgtcttttaaaaaaaacagcatttcactaggcgtagtgactcacacctgtaatcccaacactttgggatgctgaggcaggaggatcatttgaggccaggagttcaagaccagcctgggcgacaaagcaagaccccatctctaaaataaaaataaatagcatttaaaagccatcaagctgtgtaaaacatatctaaaatttcctgccaagagtatttaggaatagggaggtttatactttatttaatgagtctaatgatttctgttcaagggtcaaagaagcatttgggttttctacacgtttgcttgcttaaacccatgccatggggcaccactgtaaggatgtttggccgttctcatttcttcacagcttgttctcatgccatactgtaaatcactggacatcttcaccgtgggaggttcaggagatggggtggtcaccaacagtgcctgggaaacctttcagagataccgatgtctagagaacagcagaagcgttgtgaaaacaccgatgacagatgtttgcagaaacatcatctttagcatttctgccctgttacaccagacaggcctgggtaggtattgctgggcagctgcagcagctgctgtttctggctctgagtatatctggcacatgaagtacagtggagtgcccaccccctagccctgtgttaggcagcacaagggaaatagtgtctcagttacagtttgtctttatctttttaagtaatatttcagtgaaagagcaccactgaagatggaattgatattcaagaaatatgcaaataacaggtgaccaggggaaaagtccatgaggataaagcatttccataagcagggtagggagaggggaatggaatcagagaagcatcaaatacctgaaatgtatgtttttctctttgaaacgtcagaccatcctctgaaggtcactgggctttggtctaatgtcctgtgatatttgagctttgaaggcaaggggagaaaacattaatgacctcctgcctagaaaaactgttttgatctgccaactctgcctcccctttcttcccttccgctcatcatagggatgatactgttttaaaccagaactctgaataatccaaagtagttaaaggagaaaggatcagggagagcccgatgatgtgctgctccgtgtcatgggttctggcctctctttacccacagcttgtgaatgcgaccctcagggttcgttaagttccgtgtgtgatcccaacggaggccagtgccagtgccggcccaacgtggttggaagaacctgcaacagatgtgcacctggaacttttggctttggccccagtggatgcaaacgtaggttcctcaaaagcattgttatgcattcattcagattaactcagccattgtggcagggttccattgctgcagagccgatgcttccctcctgaagttgatcacaccaacccatgagcattctgaattggggacagggtgcttataaaaggagcatgtttccattgaatgagtttctcaaggcagttccttgtttgcctgtttctttagcttgtgagtgccatctgcaaggatctgtcaatgccttctgcaatcccgtcactggccagtgccactgtttccagggagtgtatgctcggcagtgtgatcggtgcttacctgggcactggggctttccaagttgccagccctgccagtgcaatggccacgccgatgactgcgacccagtgactggggagtgcttgaactgccaggactacaccatgggtcataactgtgaaaggtatgcagatgctgaaagtaaggagaatgtagtgatctctggctgagcagacagcatcttagaccaaccacagaattcatctccaccaggcttcagctcgctcattcatttctgaccacctcactattttctaggatcttgtttgtttatccagtacatattgagttgacatcctctatgtgccaggcaccgttctggtgctggagataccgcagagaacaaaactgacatgaatccgtcctcttggcgagtcaccctagagcttaccatagggctgtatagaaattctgtctgtctcagcagattctggcggaggataagagttgtgaaatgctcctgcctaatttaggcgaaaggagaaactaatccaaatgggattagtcattttaaatagctttgtttttcagaacgttttatgcaactacagtttccaggagactctataaaacatgcctaagtagatctgttctccagttagcaaatgtcagttgaataatcattatggatgtgctagatgtagagtaagaataggagagagaatatacctccataacattaataggatagctcaatagataaaaaatactccgtatgaaaaagttacctgctgacttacactgtttattactaattaagaaatgcagacagtactgttagaactggctttttgggcgtaatagtctccaccttttcactgtgataatttttctctcttccaacatccattcgccctatcgaagatatttgtttttaaaagtcacttgtgaaacattgcagcaagtgcttcagtcagtggtgaagttactcatcaggtgaaagagaaattgttagtgaaaaactgagtatgtgattaacttttggcatgaagatgttcatggaggcaaacacgtggctctcggctcaatgctagaacggtactcaagaatttggaggtcccacggactaccctttgaataaaaattatcccttccaaccttaaaattgtgttgtagaaagatagcaaggacacagttatacaacagtgaaaggaggaaattaatattttggggtcatctttttcttttcagccgttttccattattgttttttcaaagagagatggagaataagtacgagagaaagatatgagaaaacagagaaagacatgagaaaaagattaacagggagcagagagaggagggggaacagaagcaaacagcaaagggagctgccacaatgctgattcagaatcagcactcacactgtagaatgcatttgaacgaacatcatgtcagaatggcatagttgatatctgtgaccagctttggattttatttgtaaagggttttgagaatgagaaagggtatgggagaaggaagatttttaacaataggtttgggtggcaaacacttgattttaagtatttggaattctactatctagtttgagccagtttctcatcattcttttttctcattccaagataaccagagtttcaatcctgtgaatttacaaaaaaactctacacttagattgtccccaaggggaggcaagaaatgaacactcagtttctatcatgatgtatttggattgcctccaaaagacttgagaaacaaattgaattggaaatccttggacctcagttcctggcccaattctgcttctaacttgctttctaaccttgggtgagttaggatatccagcttctagaaaatttttttgagacggagttttgctcttgttgcccaggctgaagtacagtggtgcaatctcagctcactgcaacctctgactcgcaggttcaagcaattctcctgcctcagcctcccaagtagctgggattacaggctttttgttgttgttgttgtttgtttgttttgagatggagtctcattctgttgctcaggctggagtgcaatggtgcgatcttggctcactgcaacctctgcctcctgggttcaggtgattctcctgtctcagcctcccaagtagctgggattacaggcacaggccaccatgcctggctaatcttttgtatttttaagggagatggggtttcaccatgttggccaggctggtctcaaactcccaacctcaggtgatccacccgctgcagcctcccaaaatgctgggattacaggggtgagccaccgcacctggccggaatatccagcttttcataagtagaataactaggttggatgagattgtctccaaagttccttcaagatgttatgttgtaggacataaaaaagtaacataattaccattcaccttgacaagcaggctaacatagtaaaagaatgtattgctttaaggaccccaaattcaaattctggctcattatttaactagttgtataaactttgagaatcctttgacctccctgtatttgttatctttaaagagtgggattgacatgttggatatgggaattaataagtaacatgacccatccctgcctgagtttggaaccacctgagagacaaacacaggggctacacagctggagagcacccctgtcaccccctcagctccagtactgggaaaagctgggttatagcacatggctttagacctgtggccaccgtgggcttgccaacacatcacccctctcaggcataggcagaggctgacaggtataagccccgcctaggaggacagactctgtaatacaaggagggagcagaactgaatggtcaggacaggcaggcagctgatagaacaatcaagtgcacatggggagaggtggctcttcctctggggagcagtgagtgaggggccagatgaagccatgggtgtcactcgaacgcagtggtcctgcaagtaggatccctagatcagcagcatcaatattatcggggacctactgaatcagaaactcggtgggaggagcccagtcatctgtttcaggtgattgtgattgaagctaaagtttgagaaccactgttcccatagtaaatcttccacatgaaaacataaagagaggtgggcagatcacctgaggtcaggagtttgagaccagcttgaccaacatggtgaaaccccatctctactaaaaatataaaaattaggctgggtatggtggctcacacctgtaatcccagcactttgggaggctgaggtgggtggatcacctgagatcaggagttcaagaccagcctggccaacatggtgaaaccctgtctctactaaaaatacaaaaattagccgggcatggtggtgcatgcctataatcccagctacctgggaggctgaggcaggagaattgtttgaaccaggaggtggaggttgcagcgtgctgagatcgtgccactgcactccagcctgcgcaacagagcgcgactccatctcaaaaacaaacaaaaaaacagccaggtgtggtggtgtgtgcctgtagtcccagctacttgggaggctgaggcaggagaatcacttgaacccaaaaaacagaggttacagtgagctgagatagtgccactgcactccagcctgggtgacagagcaagattctgtctcaaagaaaacatgaggagtggagaagagtgtgcccaaacagaacagttttcaagactttccttggaacaggtttcttagaactgtggggtcatggcctgttctcttctgtgactgatgcaggtgcttggctggttactatggcgaccccatcattgggtcaggagatcactgccgcccttgcccttgcccagatggtcccgacagtggacgccagtttgccaggagctgctaccaagatcctgttactttacagcttgcctgtgtttgtgatcctggatacattggtaagtcgtgtgcatactttgggaggcaaagagagagaaaaagatgtctttatgagttcattgttaatgagaaaaaaagatgcaaagtgaaccaattaagtctacttttataatttttaattaaaaattagaaaagatgctcttttcctatttggcacatggagtggagtcaattcatattgagtctctgataagaacgttataacacaaagcaggaaagtaagctcgtggaaatctagaaaccctgtggaacacttttctgttattaaacattagaaagattaacttaagttttactcctgcctttctttatccaactcctagcaaaagtatctcaaagctgtgaggttaccaaatagtagtcagaagaaagaaataatatcatccagggaatcacaagatggccgaatatattcttcactgttaatgatactcacattatctatcaagattcaattaatctagctgggttgttaaaaactccctcttatttcatccttgaagccactgttacaaatactgattatgtttatatgtaactcagtaaaatttttttgcatataatttcagaatttcttagggaaattggtcatcattaaagatcccatttttcaggttgctcacagaggagtggtaacttttcagtttctgtaattctttgttttgttttgtttttgagacggggtctcactctgtcacccaggctggagtgcagtggcacaatctgggctcactgcaagctccgcctcccaggttcacgccattctccagcctcagcctcccgagtagctggggctacaggcacctgccaccatgccccaccaccacgcctggctaattttgtttttgtatttttggtagagatggggtttcaccatgttagccaggatggtctcgatctcctgacttcgtgatccacccacctcggcctcccaaagtgctgggattacaggcgtgagccactgcgcccagcccactttctgtaattcttgaattaggctgggtgtggtggctcatgcttgtagttccagcactttgggaggctgaggcaggaggattgcttgagcccaggagtaagagaccagcgtgggcaagatggcgagacaccatctctccaaaaaaaaaaaaaaaaaaattttacaaaattagtcaggtgtagtgccgcaaacctgtagtcccagctgctgggaaagctgaagtgggagaattccttgagcccggaaattcagggctgcagtgagctattatcatgtcactgcattccaacctgggtgataaagcaaggccccatgtcttaaaaaaatgtaatccttggattaggatttctacatgaagctatgctttacattgttagtttgctcccaacatgctccacccccatgtgctcagaagctaaagtctcatgtgctaggacctaactgtccacagccgctgtggcctctggggcagttgcaacactgttagagactacaaaacattagattggtgcaaaaagttactatggtttttgccactgaaagtaatactgccttcctctcacaactcaaagcctattctttccccttcagatgtgatcaccctgggctctttaaacagtgcagtgaagatgaagcaccgccacgatcagctctctctaggcatgagtgtcggtgcactggtgagctttcagtcaataagctaaacatcttgtgtttggttttatcgggtgacaggttccagatgtgacgactgtgcctcaggatactttggcaatccatcagaagttggggggtcgtgtcagccttgccagtgtcacaacaacattgacacgacagacccagaagcctgtgacaaggagactgggaggtgtctcaagtgcctgtaccacacggaaggggaacactgtcagttctgccggtttggatactatggtgatgccctccagcaggactgtcgaagtaagatgcacatttattctgcccacttcttagaatgacttccacctttttttcattatcagcagattttattcttcctgtatttatttcacttgggaaaacacttgttcagagaggtaaaatttcactttcaactaaggaaagatgagaccaattttttttttttttttaatgagacagagtctcactctatcacccaggctggagtgcagtggcatgatctcagctcactataacctctgcctccagagttcaagtgattctcatgcctcagcctcccgagtaggtgggattgcaggcaccccccaccatgcccaggtaatttttgtatttttaatagagacggggtttcaccatgttggtcaggttggtctcgaactcctgacctcaggtgatccacccgcctcggccttccaaagtgctgggattacaggcgtgagccgttgcacctggtcatttttatttttttctttacatccacattttctggcaggagtgaggtctcaagatgtgactcagtgcctgggagagataacaggaaagaaaaaccatgtagctgtccccatgataaatggcatccagtagagggtactgatggtatgctctgcccatgaacttgctggttggatggacttcgaaatcctaaatacccactgtggtcccaccttttctagtggcattgatggaatagagccttccagcttaaggaagagaaagaagtagcatctctaacatctctcttttggacctctttatttctctcttaccgagatcaactagcatttcctcttgctgcagctgcacagcccccaggctcctggctttgtttatacaaacatgtgtggaatgctagggaccagcaggactggattccttaaaagccttagtagcttaaagggcttttacctgctatgtccaacacgtttattacggctgttctctgccaagagtttgaaattattagatatctcaattcccactggcattttttaaaattatttccagttaagccttcaattttaaaatgactcaccagcatcttgtcaaatctgtgtattttgaacatacttttaggtgaaatgtgtcattgtgtgtatctgggaaatgtcagaactgtgtaagaaatcacgagaacttctaaacagtaattttagctttatttttgaatcacctccatttctttccttctttgcatttcaaggtcaagatgtgaagtgggaacatcttagcatttagatgtggctaacatccgcatgcctgtgtatttgggagtgtgacaataagtaaatgtgatgttcttttgcagagtgtgtctgtaattacctgggcaccgtgcaagagcactgtaacggctctgactgccagtgcgacaaagccactggtcagtgcttgtgtcttcctaatgtgatcgggcagaactgtgaccgctgtgcgcccaatacctggcagctggccagtggcactggctgtgacccatgcaactgcaatgctgctcattccttcgggccatcttgcaatgaggtgaggggctgctgctggggatgatgcctttatgagctcaggtgtcagcccatggtgactttgccccagttagagcaaggcaccagggcacacagcttgaaacacagcgtggcctggatcttagccctcatttgtaccccttggctgggtctacataactgtgcacagagtccccatcagacacatccatagcatttcagtagagggtcccagctgcagatgcagactcacttaacaatagacaagggtgtgctatttctcttcagtacctgggcgctgaagcagactcttttcttagcttctcgaaaggaaccaattagccatacccagcattgtaaaaagtgctgttgtttcctgacacatgctaaggagggcatactccctaagtcaggcgagtcaaaggtggcccaggattgtggctgatctgtgaggataaaagtgaggaaatatgtaaataaataataacatgccacagacctttccaagccctgttgcaaaagagcacttagatgctggcatggggctctcgacacctacgattgaagtgggagtcccttttcctagtcaatggagaccttctcaggtaaacagttcattcctacttctaagtggcagctagaaaaaaaagatgacaactggcttctggcctgaagcctgcttgaccaaggtctgtgttctggccgcagttcacggggcagtgccagtgcatgcctgggtttggaggccgcacctgcagcgagtgccaggaactcttctggggagaccccgacgtggagtgccgaggtgagttgtgggcgttctcgcattgacttgatcagagagtggagggaactggggttctacaagagccttctgtaaattataaaacacagtacaaattaacgtgtctataagaacctgtatttaattgcaaaataaattaacactgattgtttaaaaaacaatctaacaaatctagccctgcccataagtataggtagtcaagagtggatgtgcatactctcccggcctcacaccctggggtaaagtttgtttctgtgtgtaagcacacacacacacacacacacacacacacacacacacaccacaaatacacacagagctgctttttaaaatacttttaaccaaggtgggaccatgtgaaccctatgtttggcaaagtgactttttatcccctctgaacagtattttgtggccaacttccttgatggcacaagaagaggtaaatggttatcctagtaagatcactggattcagtggatcaactagactctgttgacagtttaagctcttggcgtatgtgtgtaagataacatccccaccagtgaaaactggagggcaatgtcatggagacttcgtgcacaacaaagggctccaaggtcaggggctccaagtcagtttaatgtgaataaaacccagattttcacctaagcttatgattaaacaaacaaacaaaaaaagatggaaatgacattttcttacaaacaaaaacttgttaaaattatgtgaatcatcaggattgcttgatttttatggtattgcagtttttttgacctggaaaattatttttcagatcttaaagtcaaaatatggaaaagactgaataggctgttgcaactctgtttttatattctttctttcctacttgattttcttccctgtttttaattgatcattatggataaaaattttctgtagtttcttaagtgctctttcgtatatttgttgcacatctgaaattataggtctctgttggactcttgaattttttttttttttgagacggagtctcgctctgtcacctaggccggaatgcagtggcataatctcggcttactgcaacctccacctcctgggttcaagcgattctcctgcctcagcctcccaaataactggagttacaggcaagcgccaccacgcccggctaatttttgtatttttagtagagatggggtttcaccatattggtcaggctggtctcaaactcctgacctcatgattcacccgcctcggcctcccaaagttctagaattacaggtgtgagccactgtgcctggccaggactcttaaatttttaaaatgaccgttttctttttttggacacaactacagcaagaaataatacagatcttcaagttggcaactcattcaatatctcctacagaaggtcaggaacctagaaactgtgttccttcagggtgcaaacccatgtgttccttaacagcagaaaaaggtcagtgggcaagaccagaacaaattagatatgatttgttttttaagttgaggcttagccagaagggtttgtatggacctcttagattaaggtttgtttcacagtggggataatgtttgctatgtcaataaacaggtacttttctttcatcattctccaaatttggttcttaatgagatctgacatcccctcttccattagaaggtattgaaatccagtggaccagtttctccaagatgtctcttgaaagtaaaactctgcttaaaatctgttttttccagggctctaatcactactctgttaaattcctcaaacttgtaatgccccaaggcttgattttttccagataatggctctatcgttgcacataccctgattctgtcagcatgtgtcattggcaaaatagctttctctgccaaagctttctgacctttggctccatcttagctttgttagcaggaaaggcctgctacccagagtcagagtcaatcagagaattgttcatgtggtccttagaactttactccttacccttttatcttttctttaaactttcgcctctaaatctgccagggaaattgtgacttatagaaaccttgtcaacttgtttgggtcaaaagttagatcctgttttagaaactctgcaaagagtgagattcatggcatcattgttcgccaacttctttgttcctttcatccagaagaaaggtcagctcattacgtaagaaacttttcatcaggaaaagcaaacaaccgataaaaaacagaaactaagtattctgcaaggaaacctggtttaaggagaatgtattgaaactggatatgtctgttcctttttactcctccctttggcatttcctttttttttctgtaagataatcatagaaatttagttaatggaggaactacaaagatcacatggctttatggtttgcctattatgctggccaatcccggtggcacgagggcagcagggatgcagacagatgaagaggtcccatagccaagagtgtaggtcctggagccagactgcccacattcacttcaagcaattggtactcctgtattagaagaaaacaaagtcccttctcatctcctcacccagtatactcctctttttactcagcttgataggaatctttccagtcctctctgcatttatatgtatacatcattcgtattcgtgaccctaataatgatacccagtcagctcacaccagcaagaaaaagtatttttcaagccctctggaagcattggaagctccaagtgagcataagtgaaaataccctaagagatacttccaggttctagatccaggtgtttcattttccccttgttttcccactacattgtcatctctccaaccttatctttagttttgtttttttcatggaagaccagaaagcccctttccccaaagtgttaaaatctggggtgaaggcaactgacctcattgcatactttggcaattcaaagttataaaatgttagccgggcacggtggttcacgcctgtaatcccaacactttgggaggccaaggcgggcggatcacttgaggtcaggagtccgacaccagccggaccaacatggtgaaaccccatctctactaaaaatacgaaaattaatcaggtgagatggcgcacacctataatcccagctacttgggaggctgaggcatgagaatcgcttgaacccaggaggcagaggttgcagtgagtgagcagagatcgtgccactgccctccagcctgggtgacagagcaagactgtctcaaaaaaaaaaaaaaaaaaagaagaagaagatataaaatgttggggcatctttatttggggtgttaaagtagatactgtctctcctttgtgcccacagtggctgagctggggtggggacatttggaaatttgggaggaggggagtattttgggtcatcaccataatggggtcattgctataggcacttggtatgcaggagccaataataataaatgtcccacagtgcttaaggcagtctgtcaaacagagaatgtgtcggatcctcaatgcttttagcactctttggagaaagctcataacctacaaagcacccagagagagtgagaattgatttgagtggacaatgggggattgattcatggccagctatggggtctggtgcagacagggtggcaacaggagtaggaccagtgtggcctgtgaaggcaggggccaagatgcagaggcagacaaggctcttggttatgtttgtgctggaatgcattcacgattagaaacaggagcacaggggctttctgaagggatgggcccagagatcagcagggacaagaagaggtgtcattcaaaattagatggaactatgcaaaaagaacatcagctcttttctccagttatgtaattgcttgacaaatatgttttcagttgaattggttgttagagggcataaatttagactttctgatgccaactagctaacaatatgcttatagaaagatttaagtcctagctaagtattctccttatggaaaaaaagaatgtagttatgtaaaagacaaatgagttgagcctccaacttacagattgttgaatgttcctattgtccaggcgggttggggctgttggtcgatggtgccaagcctgaacaagcccaccactgtgctgggatggagagggaatctcatccacccaccatgaacgtgctggagaaaacagcctggagcgctgcattgtcctcctcaggagtcaaagagtcacaggaggaatctttctgttgattcatagatagcaaaaaggaagggtaaagtttccatttggggcctctggctcttggaaaagggcagtgtctctaaacccaggcaaacggtaaatgtggggcataggcaagagggtccgggtagtggccacttccccatcatgctcgtttctcattttgtgttttttagtagaaaaacacagtgtgttcttttgcccagacattaatctttagaatgcctgtattttctaatgttgggatttctttcacaaccacccaccttaatatttccattgtgactcagaaaatcagacttcattcgattctttagagaactataaatactgttgtcagtagagtgaagtcttgtcttatgtaatcctaattacagaatgtgttctcagaagaggtaggctagaccagagctgggcagaccacaggcagaggccaaatccagccccctgccgatagtagctaatataagttttacacccacttgttcatgtattttccctggctacttgtgggcagcaatgccagagtcaagtcatcataacagagacagaatggcctgaaagctggatttactatttcaacttttacattaaaacttgatgacccctgtgctagacaggcagctcatttctgcaggtaaaattatattcatctcccaactttcattccaaaattgaacctatattactgaggccaaaaagggaaaaggataaaagagaatgtcagaaaaaagaaaatcccatgtaagaaataaaaattatttaaattgcccttgcttttagtaaatagaaatgcctaagtaaagtatcagtaaaattcttggcattgcagcagatcctggagtcccacgttgctttgaggcaaggtccacggcagaagaaaaccccattacctgaatcttagggtgtagcagtttctctgtcccaaggcaaatttaagtttccaacaaaaaggaggataatcagcccagtactgagtgaccaatggtatagagtggggagtggacacagagagaacagctgatactgttctgccacttgcaggctatttggggacatggggtacataaaatgaagtaacaagatagcagaaagtaagtggcacaaacttttcagttgtcagaagagggcaagatcagtaggaaatggagtcattagggaagggtttgcagaaaagattagctctagtggccatctacagagaacgtgctgagtgccaagcacttttaggcatattatataagtattcttaattttatccttgcaacaaagaacctatgggggtaagtatcatctccatttcacacttgactaatctcagactcagagaggttaagggacttgcccaaagtgaggaaagaactgggatctgaagccaggcctatgtggccctgtgtcccagctgtttccacaagcctgggggctcctcattgacagctggtatttagagaggaaattatcatccaagctaaaggacaacacagacaacatgaagcagcatggctctgggaggtgccctcgggaaacagtctcagctggagagtcatggagagatttggtttcaccagattgtgtgaagccttcggtgctgggccattaagggtagactttgttcagtgggcacaggaaggtctggaggaggagagggaaggatgtaaaggaagcaggcaagttaggtctatgtgataaatgggtacatagactatttcccattgtggcattgacttgctagtgttttcctctggaccttagtatctttaaaatcggtacaatagctttcatttacctacttcttaacaattatgtttgaaatgataagaaaacttagtaaaaatagaggaagcctactggccacagaacagagagtgtgtttacagatgaaagtcaaattattatggcttgttaaaatgagtatctcatttaaaaaatactattcttcatcttcatgatttgttcatcttaaagattaggcaacaacttttgctatgtatgctctcctttccaagagaaagtttctgattctctgccaagtaatcccatttcttaaaataagactgctttatctaggtcatttggattctgattcctttctcttaagagagaaggagcccactggacctcatcagctgcagcctgaatagtcagttcacagtttttcagatcctggtgggtgtgtgagatgatgggagaatctcctccatacattagtgtccatgaagttttactaacttgtcaagtgtgaactgacctttctgcttcagccacgtgagtgtgggagtttcactgaaaatattcttgaagtggagggggtctttttacaaggttgtaaaatgtgggccttctggtgcctgcctcttaggtgactccaagagaagcaattctggaaattcaatagccagggaaggaagcacatgaccaggggcttcagcttgaaatcaaaacctggtacatttgagactagttatttggtgccctcccggagagtcaggcccaactttttcaataatgacactgcaatccggtcatctgtgagatttgatggtttacttttcaggtgggagaaaggaatgttggtcagtttggctgaactggttgttgacttctggagagagccgaagctctgctagctcattggaactcttacccaggctaatttccctcggccagataaagagggaagccttatctgccttttaagtctttcagggttgggctgttttccccttaaagatgcctatgacagaatgggagcaagacatgtctttggcaacgaaataaatgaaaaatgatcacagaaattaaaaataaatcaacgtatgcatgcatcccttgccccaagcatgaatccagcaaaaacctaatgtttaggactgaacaaaggtatacctttgcatcatctatgggaaagaaataattgtctaagcaaactataagcatatgcaactctgcctcagttgtgtcaagtctaagggagatgggtgagtaggccccagagggctgcctcaccctgaccactggctggtagacaaggtaagttttattacaaatggcatcacttcttcctctgttacgtaagtcctgagatttgtgcatcagcctacattgctgaacttccgaagtcgtgattctgctccagctccaccttttgaagggtatctctttctccatctctcacacagacacacagatacacacacacgcacatgctctctttttttctctaatatacagaaggcgggcagaaacagctgggaaagtaacagtcagtgctccacaaaacggggtcgcgtgactgtgaacatcagtatctcctgggaacgtgatagaaataaaaatagttctgggccccacccagacctactgaatcagaatctggggatgggaggagagtagagaagcaatctgttttttatgaaccttccaggtgattctgatacctacccaagtttgagaggtgaggacccaggtgactcgggggtaacttttagctttctggaagatgactaaattttaccaaatgataatggaaatgtattcctaaaatctaaacaacataaactcttaaggtactaagttatttaagttatttgtaagttatctaagttcttcctaatctcagaaatcgattaatgtagtggttttcccaagcctttctcattatttctcttgggtgtcactggcattgacttccactaaaaaaagatcccatggtcaaatgactttggcatacatacaactggataaaaacaatataaaacagtttttcctgcagaactcttctgagtctgtaatatgctgacacttgtttttaatcttcaagataaggatacagaacttttcatcatgggatagttttttcaaggaacacatcatagaacgtatggtctacggatcaccattaaagttatccatggtttgcctaaacagcttcctgattcattacgagaatattccccaaacaagaaaaatgaaacatactttaagtacctggaaaggatctgttttttgaaaagcatacacccaagttttacttttgaaatcctaaggtcttggttttgaaaaccccaggcgctaaggaaattacatgttttaaaatcctaaaggttgaggaattaatattctaaacttcaaatttttgaataatcatgacgttattggcaaatacatataaataaacatataaccggaacacgtttttcccctttatccaatggaaatacgatcaagcatcactcttagcagaagactaccagacacttgtagggacacgaaaagtgataataaaaacaatttatttattgaatgcttgctatagaccagatgctcttctaagcactttgtaattattttatcttgaaagcagtcctgtatttataatcattacctcttcttacagatgtggaagacgtgactcagtttcctgattacccagggtcacataacatgtgtggagaaggcaggatttaccacctcagtccgcagttcatgctcttaaccataatgctgtactcctcaaacctgccactcgagagcttggaatgtagggggagaacaaagacaataaaaagataaactagcaatacaaggcaggatgtggtgagggccaaatgaatgggccacaaacacacacctctgggttgaaaggatggtgatgttatagcagatctcaggaccctcagtataactggttctgggagatgttccattagaaagtttttcagaggaaggccgggcgcggtggctcacgcctgtaatcccagcacttcgggaggccaaggtgggcggatcacaaggtgaagagatggagaccatgctggccaacatggtgaaaccccgtctctactaaaaatacaaaaattagctgggcatggtggtgcatgcctgtagtcccagctatttaggaggcagaggcagaatagcttgaacccgggaagtggaggttgcagtgagccgagatcatgccactgcactccagcctgggagacagagtgagactcttccaaaaaaaaaaaaagtttttcagaggcaaatcacagctattgacccaagagtggctcacacctgtaatctcagcactttgggaggccaaggcaggcagatcacctgaggtcgggagttccagaccagcctgaccaacatggagaaacaccgtctcttaaaaaaaaaaaaaaaaaaaaaaaaaaaaaaaaaaaagccgggtgtggtggcgcatgcctgtaatcccagctactcgggaggctgaggcaggggaattgcttgaacccagccaggaggcagaggttgcagtgagccgagatcgcgccattgtactccagcctgagcaacaagagcaaaacctccgtctcaaaaaaaaaaaaaaatccgagaaagcatgaatctgttgtgctttgccacagttgacattgcacttcaggaggattattttcttttatgaaggtatgtaagtgtccttgcatgcctagactaaaatgaggttagggcttcatttggcaaagacgtttggattctgattgcaagttaaccctgagtccgatgctgaaaaacgaaaaatggtttaagatgtgcccctgcccttggagtccacaatccagttagggaaataagatagtatattctttatttattcctgtctttcctcagaatgggtggaagcccagcgataagatgttagcataaggcctttcgtaattcaaaccctgtataaatactttcaaatgtcagatgttgatataaaaatgatttggtcacctgaaatttgggaatctaagccagggttcaagggcacagccactgtgctaagtaatctcagccacagctactggccaagaacacattttgtcctgtacggcacgtgattttcctgtgccatttggctttgcatgaggtgccaaccctattgggcctgtgagacgctgagactgaatggctcccaagatccctgcttgtagtactggcagtggtcatcacaatggcagacacccccaagttagattatacttagttgaaagcctttaaactggatacttagaattcctttgggttttgttttgttttgatcatgtttattgcatttcatcaagtatgttttgttgtgagatagagtcaggtacgtaaagagcttctcatttgtgatgtatccgatgccaggtggcacattatcaggatgtaacctggattgtttgtacagacatggtctgtggggaaatcctaagtaagggggaggcaaaggcaggacggaggtgaagagtatagactccggagttgcaaagaactgaatcagaattctggcgtggccttttccttgcagtgagacttggggcatgttacataatctctctgatctctgagttcccacatctgtgaaatagtgattattataacacgtatcccatagggttattgtgagagttaaatgggatcattcatataaaacatttctgtttaaagtattattactgctaagaaggggttagcaaccactgaagtcacgcatgtgctagaggaagctgctacagtctctacctgagccattggtcaattgttgtcgatggttgacaccttcccattttcacagtgaagtgagtattctaaatgccacatcttgtcactgaggttcatgattaagtagatcagctagcattgcttattcccttctagcctgtgactgtgaccccaggggcattgagacgccacagtgtgaccagtccacgggccagtgtgtctgcgttgagggtgttgagggtccacgctgtgacaagtgcacgcgagggtactcgggggtcttccctgactgcacaccctgccaccagtgctttgctctctgggatgtgatcattgccgagctgaccaacaggacacacagattcctggagaaagccaaggccttgaagatcagtggtgtgatcgggccttaccgtgagactgtggactcggtggagaggaaagtcagcgagataaaagacatcctggcgcagagccccgcagcagagccactgaaaaacattgggaatctctttgaggaagcagagtaagtagttaatgagccagaggaattactcataaagctgaaaaaatattgtgagttaacagcaaagatttcctggcatggtgcttccatcaggaggttttgttagtcctgtgggtgagaacagattctgagccatttattttccagcagtcttgactgggcatttgggtgagtgaacgttggcacatcagtggggaccagccttctggaggctgcagtacagaatatgcaagcattatattcagtgctcctccttgcaaatcatgttctaagtcagtaaaatgggaggaatgctggatttagaagacaaagatccataattgagtcttggctctgatgctaggcttgtgaacttggatgactcaattcctgagcctgtattttctctcctgtggagaaggggtaggataatatatgccattaccttatgaagtaatgaaaggatttatatataaaataacaacaggattgcagaaaattataaattaagtattgctactatgggggaaattccattacctcaaaataagactgcttacttcaagttttttctgcttctccgccattagtccaccagaccagtgcttcattcatctagttataacagctgctctatgctgaaaagtcctcatcccaccccttctctaggtaatcttccctctgattggacagtgtttgttagtggaagcctagagaattgaccttctcaaggatcatttatctaccctttctcctacctcccctctcttgcccctaaacttcccaactccttttgccaaaaaggaacccccaaaacagcacaataagacctaagtgctaaaggacaaaaatagaaaagggtatgaggcatctgtgcttccctagatgctatggttttttcactgcagactcaccatctaggcctgaggggactgcttcacagttaaatcctgcacactgaggtgtttatatgacgaaatgacagtaacattttttgtgtgtgatgagactttaatcagcacctttaagaagccagagggacttttcatctcataccaggcatgagtagcagaggacagctgacattagctcaagcgacttgaaggaggtccttcctagacctagatttaaagtaactggaccttgatgtcaagccttgggttttatgcccaagaccatgtagctggccagagtgttaggaaacgtctgatgtagagtgacaatgcatttagtgaggcattttacctcactgaaaagactaagcctcctaatgtgcagagatcacagttttggcaggccgtggtccgaatgcaagcccatttaggaaatgatccttggcctgggtcttaggcatctctgggaggaagaaaaaaatctggtgtcctttgagagcctgccagaagagagattacattcccaaaacagctctgtttctaccgtcactattcatttaactagacagattgtaataatcacaggaaaactagttccattactcttttttttcaacatactatccaaggatacatgttttaggaaccaaagtggccttattttaaaatacgatgttagatttgcttgttttaaaaaaaattgtatcattttatgagacctgagaagaaatgaaagccttctgtgagtcatataattaataaaagcaaagcactgaaaaaagaaactatgtatattagcctcaggaaaaaaaggcactgaaatgtaatttaatctaccattttaaaccatccctttaagtactttttctttgagttgggttatagttttatctcagccttacatatcatttttctaatggctcccaacctttcagcatctttacattttcctggttttttatactattatatcgccaagaagacaattacattcaattaggtgaaccagtaatacccagaggtaaaatctgctcaaatattactttctttacaatacacatacaaccctacccacacccacctggagcacactcgcatgtgcacacacacacccatatccacactatgtacacaataatatacaaatagatgtcaaaagtacggctttgtaggtttgaaagtacagaacaaaatgcagtttagattccaaattaaatactgtgaaagctaaatcttcttatttcattcttagtagatgctattttcttataaaaaataaaaaggctgttggtagaaggaggcccctctgacggaagagaggagtgtatgaaagctgatactggtggctcctgttgtctttgtggcaggctatagggcttcccctctgcatgttccatcttgaaggagatccctgaggcttagggaagaatgttttgggcttgtggctgggaggcctaattgtataactggagtcatttatgtcttcagttttcacaattgtaagggcttgaagctgcctgtgaatagagccagaactccacactctgacctgtgctcatcttacagcagaaatttggaatcccttaaatggcttgtctgccacaactcagctgagtggtacttctgtgtttctctcaaaagtcattgaacaaagaaaaattgttagatttaatactatctgttataaggaaaataaaactagcacttagggatgaaatgttacaaattactgaattggtttgaaattagtaatggatacagtactagtagaaaatatgaaacgtgaaagttctcccttgggtttattttatgtaagtaagcttaactttctctttacaggaaactgattaaagatgttacagaaatgatggctcaagtagaagtgaaattatctgacacaacttcccaaagcaacagcacagccaaagaactggattctctacagacagaagccgaaagcctagacaacactgtgaaagaacttgctgaacaactggaatttatcaaaaactcagatattcggggtgagcattttttggtgcaaatagtcccagacaatggatttaacgatatgtctaacgttttaatatagcacttttggggaaaaaaaaaagttttctaataaattttaaaacttttgctcatccagtttctggcacaaatgaggatcaaagtccccattttacaaatgtgggacttgggcacagagaacctaagagacatagcaaaggtcccacagagtgaatggcagtagttgtatcagaatggtatccatttcctgattttttttttttccctccagttagtagtttaatcccctggccttttcttggaagggggttcttttgaatagttaaggtattaatacttctgcaaatcctttcacattcaagaatgctgcttggtcagaaaaaaacttttgcaaatcattatttatatcatagactgtaaaggatcctcagcaaaaagtgaatgtagaaatatgttacatcatactgtccaactatccatactgttttatgcatgattgcttttggactaaagctaaaaacatgtcatgctgttatatataataccgtcatcccttggtatccatgggggattggttccaggacccactgcagaaaccaaaatccacaggtggtcaagtccgttatataaaatggcacttgcatataacctatgcatatcctcctatatacttctttctttttctctctctctctttctttctttctttaagagatgggctcttgctatgctgctcaggctggtcttgaactcctggactcaagtgatcctcccgtctcagacttctgaatagctgagattatagaggtgaaccaccacacccagctttacttttttctttttttcccttcagtatatttaaaagtaatctgtagattacttacaatacctaatacaatgtaaatgctatgtaaatagttgttatactttattgtttaggaaataatggcaagaaaaaagtctgtacacattcagtacagatacaaccattttttccaaatgctttccatccacagttggttgaatccacatatgtggaacctacaaatatggagggctactatattagtcatttgagtggatccgaataaaggattgagaaaagtcatctagtcatataatcttcaggctgcctgaaaccagctatttataaagaactggatgtttgcttgtgtatagaaacaagattgcatgattttcttaatttttcatttttcacccagatgtttgccatactcgagctggagtaggtgctaatgggacaaaacatattcattgctcatgaaaactgtacttcataaatattttttcttgaattttaaaactttacagtaaatttaggacccgaagacaccaaatatagacactgcttggggaggaagcctagtatgatgaggttaactgtgggcaatttcatttcctaccctaggtgccttggatagcattaccaagtatttccagatgtctcttgaggcagaggagagggtgaatgcctccaccacagaacccaacagcactgtggagcagtcagccctcatgagagacagagtagaagacgtgatgatggagcgagaatcccagttcaaggaaaaacaagaggagcaggctcgcctccttgatgaactggcaggcaagctacaaagcctagacctttcagccgctgccgaaatggtaaggtttggggatgtggccttactgctatggtgccaagcaaaaaaaaaaaaaaaaaaaaaaaaaacaaagaaaaacaaaccatcttttgtcattattacaataatttgcaaatgaatcagcaggactgaaactcctaggctgaggtctctggatcctggaatggggtatctgtaaccaagacagattaaaagcagcagcatatgggtttccagccttcccctcttctgtttctctgtggtcctcaactaaagaatgaatcatgactattctcccatactgttttagctactcagtgacaccgcactgaaacttgatcctttttacactgtggacatttctttaatattttttttcctaagtagagacagggtctcactacattgctcaggctagtcttgaactccgggtctccagcaatcctcctctcacctcagcctcctcccaaagtgctgggattacaggctaacaccccagcccacccccacccccgcttttttttttttttttttaaagagatggagtctcactacgttgcccaggctgacctcaaactcctaggctgaagcgatcttcccacctcaccctcctgagtagctgagatgacaggcatgtgccaccacacccagcttggacattccttttttagtttgttctgatttgaattataaaacccatctcagtgtaggaattcagagtcattctagaaggggcttccattaaaaattaaagggagcaaaagaattttttcacgggtattagctattatgttcctttgttccagtaactttacctggtgaagattaaccctgaaaccagcctagaaagtagattcatttcccagaagcttttaaaaaggaactctggagccaaatgaaattgggttgtgagtttaatgaaaatcaggcagaaggccccaaaaaagcctaactgagcctgtttcttcctcttccttcctgtgttttcaaggaaggatacctatgtgaaataatttggagggtattttttatagactaaggtttgtgttctcttagcccagagacacagagaaagttaaagatggaaggtacataggcgcagaagagttcaaacttcattacagctttgtcttagtgatgcttcctccctcctctcatcactttctctgaaatagacaaaattggtcacaatataagacagtgtttattgatgcctgctaggtttcatactcattatcttctgaaactttatagcaaatagggagcaaataatctgtcatttattaaatggaaaaataaaagatgaagaaaaaagaaaaatgaaggcttagagcaatgtgtaaattgcagctaacaggagacaaagttatgaagcatgaaatgccaattctctccatctttcccttcagcattgattccttccttacatattgtagttaaaaaaaaaaaatcagttatcacaaacaagttctgtgtgacctacaagaaacagctaagcatgctaaaggatttttgtcttgaaccggaggcatctccgtgggcggcagggagatgcatgggcggtgggtggggttcggggttcctctggcctttcaaatgtgtgcccttccctgtgcttgcttttccacctggtaaactacctagggattagcagctgcttcagttctcttactgtgtttttgtctttgttaatgatcctgtgagaattctttctgtaagttctttactgccatttccttgtgtagagagagttttgtccttttgtttttcaggtacttctagttctgtatctttgtggatgtttagctagagccatactgtgtttttttttttccatgtctgccccatctgttgaaacaaaacagatcttctatgtgtgctgtcagattgtttttagaaagcaaccgaggttttacacttatgttcttaagactcatgttttacagcatgcagaatacactttattttctgaagctttttgtttttgtaagccagataaatgacttatttagttgtaatttgagatataatggaattataattatcttaaaattattaggctaaatagttgattgtatttatttaaaaactacttttttgtactttttaataacaatacttgtttgggaatattctgttaactccttttcactgcagtaaatctttgtcttcttttcagtatgagaatttccacaaacagctctaaatgcaattttctccctgctcagccttttctatcatatagcacacttgtattataatttatcaatttgcatttgtatgccatgaccaagtggtgatctttgagaggttttggtaggtaagaaaggaggactctatgcatgtgtgatggcagtcgggggtggtaatttgggaacacttcatctacctttgttcctttgtttgtactgttttctttaacctgtggaatgttttcccacttcccctgctcaaatcccaccagccaacagcttcttcagctacaactgtagcattcctctgcagtctctcctttgtctactttctttcatagtgactgcatctgacctattcttggctattttatgtggaatgatccagtcctaactagatgggaagttactaaaacgctaggtaatagatcttttatgtcaccatatttactggaggagttaacatggtgctggtgctggtcccaaagatggttcacaataggttttttttttaaactctaactggttagaaaaaaaggaaggcattccttggcccttgcactggcagaattcaacttgatatagcagatgtttgcatcctgggcagagctcatatagtattttaactcatttgggcagaagatattgatgagttgtaaacttccattgtttccttggaaataagcaggttagtttactcctaaactctctgctcctctctccattctgtctcccaaacactgttttcaagcacccttgctgaggaccacctacacattctctggggccacccaggccctgcacagctgttttgctgcagcagattcactatccgaagtattgtgcctgatccttggcttgttgcagacctgtggaacacccccaggggcctcctgttccgagactgaatgtggcgggccaaactgcagaactgacgaaggagagaggaagtgtggggggcctggctgtggtggtctggttactgttgcacacaacgcctggcagaaagccatggacttggaccaagatgtcctgagtgccctggctgaagtggaacagctctccaagatggtaactcagtggatggcctcagtttttgttatgtatgtttgctttcagctgtggactaaaggatctgaaagggagaaatcaattctaaatgctaactgaaatgaaaagggcatatcacaatcaaatatgaaagttcatgtttctgtgaggtcagagaaagagatggggagattttcttcacagataaagaatttgctttctcctcactcaacacatgctttagagcaagatgtttaaatcttatactggataatttgagatagccatcttacttttctgactccagggttataaatacatccagctgtatgacaaaaactctatactaagcaattgagcatttattcttctaaagtgacacacactttttaagtatttatgtgggcacctgagaaaaagactcaggactattttataggccaggagttaaaaaacaacttgaaaaattttaaatgctagttctatttatatcagaatactgtttaggaatctctatactgaatacttgcagtctgtaagatacaatactttgttgaatgggagaaagttgtttcccagacatatgattccaagtacatagtttttcaacatcatttttgagccatttccaatattctggtctcctttagaaagaatgaaagtcttccctgggtaatttattcttcatatttaggtctctgaagcaaaactgagggcagatgaggcaaaacaaagtgctgaagacattctgttgaagacaaatgctaccaaagaaaaaatggacaagagcaatgaggagctgagaaatctaatcaagcaaatcagaaactttttgacccgtaagaaattttttcattttacttttagacatttgtttctgtgtgattctctgtttacattttagataaaatccatttctgtcagggtactaagtgacatttccaaataagaaaaacgtccgtatattaaatgtttccacttcttaaacttatatatgtgtatcaaataactttctccaatgttacgcagatacagacacacctgatgggatactcaggtagccaatcaaaagtcaaatatttacattgaaaattgaacgtggaatttgttagaaattacgtatagtaatttctaaccttaaagaagtggagtttgttattttggcattgcccccaaagctttgtaattctattatttacaggatattatacctatagttagttaagagtgttgctagtcacagttcaagtgttaccagtaaagatggttttggctgcaaattacagaaaactctcaagtgaaagggacttaatcaaaaaggatgtttattatctcacatcttaataagatatccagtagcaggatagcttcctgggtctgcgacccacatacttttcatctttctactctaccatcttaagcatatcagctttgtcctctagctcctcatggttacaaggtagctgccaaagttccagacatcatataaagattaataatggaagaagagaccacctattccttgcatctttttaaaaaggaggaagtcttccctagaagcctttaagcagtcatccttataaacctcactggccagcaataagtcacatgccaatgcataaatgtcactggaaaatggaaatgcgattacagtaattcacaaactaatatttaatgctgggttgataattttacctgacttagaggcaggtacctgaaaaaaaatcagtattctgttagcaagaaaaaaggcatggctaataaggagtcaacagtatttgctaaggatatcttaggtaatattttatggaagccatcattcaagtacatattttatttgaataaatcctctggggtccatttttatgttcaatagtttaaaacataagcaaagcttgaaagtaaatgaggatctgacgtatttgaagcttaacttcataaactttttttttcaccatcttccacattttacatttgaaactccttggctttgttgacaacccattattccggttctcctgcttctataattttctccctttctataatttcctgaatctagatcatttgtaggaaatatcaaatctccatatctgcattcacaagtttctgagctattcgtccaacctcaattaaaagatttcattgcctttaagtctcagctttaagctctggccctctatggttttccacaatgttcagattcactctgctatactttcccgtaacatactctgccgttcctgtctccccatctggaattgtcctttcttctttcaaattctattatcccttaaaatctgatcagctcctcatcttccacgaaggtttccctcactacccagcctaaaacaaattctagtagtactcaattgtctgcagttacttttttgtgtgtgtaggtctcatctcccctcaaaatcccagatagattataaactcttaaacaggaagttagtgtctcttggtgtgtaaccccaccatgctagtccatagtagatgaccagtaagtggttgaatgaatgaaccatctattcttttcacctctttttggggacatctttgcttttcacagaggatagtgctgatttggacagcattgaagcagttgctaatgaagtattgaaaatggagatgcctagcaccccacagcagttacagaacttgacagaagatatacgtgaacgagttgaaagcctttctcaagtagaggttattcttcagcatagtgctgctgacattgccagagctgagatgttgttagaagaagctaaaagagcaaggtatctaaagacatggcatctaaggggcttattttgtgtatctatcatggagtaaaaagtatctctttaaccaatgaaacttctaagaaggacctatgcgagtctctctgggtcatttcaggaaggctattctttaaagaaaagaacactgagagtacttttttcatgttcagcaacaatatactgtctcattattttttactcagcaaaagtgcaacagatgttaaagtcactgcagatatggtaaaggaagctctggaagaagcagaaaaggcccaggtcgcagcagagaaggcaattaaacaagcagatgaagacattcaaggaacccagaacctgttaacttcggtaggcatacacaatcattacatgaatgggaacacacctacatatacacttaccagaaaagtacatttgttatctatgaacagaaattcttacaactcaacattaaaggattcctttaataaatctaaactactccgttagcatggatgctaaaaataagtggagataggttttcaaggaataaaaggactctgattcagacactggaccattacgtcccatctcattttctcccccacaaagtctgagaaagataaaaacttctattcttgggcgggcatggtggctcacgcctgtaattccagcattttgggaggccgaggtgggtgggtcatttgaggtcagtagttcaagaccagcgtggccaacatggcaaaaccccttctctactaaagatacaaaagttagctgggcatagtggtgtgtgcctgtagtcccagctacctgggaggctaaggcaggagaattgcttgaaccggggaggtcgaggttgcaatgagctgagatcacaccactgtactccagtctgggcaacagagactccatctcaaaaaaaaaaaaagcactcctattcattgaggaaacagcatatactctgttcagtagtatgaagtataataattttagaaaactgtcctgatgttataaagcagcttatctggttaagaaggccaatgtctcaagattttggtcatcaaacattttactatatagtagttttggaaactatgggagaacagtcagtctgctttcaatacccaattctagagaaacctaatagagcacttatagctaaacaatctgttctgtttagaatgcatggaaaacttaatgttttttataagaaatatactgtgactaccagatattaaaagtactcattacgaatttttcatagggatctagcaccttgctctaaaaatcctctttatctcttaaaagaagtaatgcaaacataattccattaaattcttttgtttctcagaaagttaatgttttcgttccaattttacgagtttttaaaaaatgaagaaaattgatgagttatctaatccctatacaggttctcagaatatactttgaaattaaatgctcccatacccagcattgtcagccttctcaggccaatcctccatgtgtttaaaacctgggaagatgaattttcaacatgcttttcttaccattagttggtaaaaacctgtgttcccctattctattgctgtcagttaaatgaaggccaataattctgtccattttcctccttaaatttcgagtatcaataagactttttcttcaggctatttgttcaagtttagaaaaattatgttttcccaccagactataaatattttgatgtttcgatctctaggtttttccattttctcagtttgctgttaatattttagtgaatattatgtcagtgactgtagaaattattgttttgaaagccaggtgcagcagtgtgtgcctgtagtcccagccacttgggaggtggaggtgagaggatcacttaaggccaagagtttgagactatagtgcactatgatcatgcctgtaaacaaacagtcactgcactccagcctgggaaatatagcaagaccctgtttcttgaaaaaaattgttctgaaaagcaaattagaaaatactgaattataggtgagatgtggcttgatgatgcaagttaataattggggttctgtttttcaggggccctagggggcaggaagtgttttaggttagtaacaataagaaacaaagagaacctctaactaaactgtgttcatgaaagcttatcagaaacaattcactcaaactttatcttctaagaattataatttctaagaattttattctaattaaagggtccttaggtttgaaatatttacaaattttagcctatgtcttatactgacccttattaacttcattatagcagtactgttattcagttaattctatgtaattagacccatccttgaagatcattttaaagaaaaattgagtgctcagtgaaattgattcttttgtcatgggctcaactgcttactttggctagcttttaaaagtcaatgtttattgattctactttgaaaggagatcagatgtggatcctcaccagttgcccagatatttttttttccctaaataactttgtgtatttagagtttacagctgtaacgttcccagaccatacatcatctcacaattctatagaaattcaaagaacatccctagtctccatgtcttcagtaattagctgaaatctccactactagagtttaacatttattttcccactcacattaagttggaaatttatgtggaaatccctcttcgcacagctgcttatttgtgaatgttctttagccaaagtttgcaggtgtccttaaaatgctttctcaacacatcatgctccttggggaggtggggttttttgtttttttttactgtcagaaaaaattttacatcaatctcagcttagatcatcagaagtactgaaagaatgaagtgaatatatgaaatgtagcaaagactaaagttagatacttcatgtaacttttcctgaaatattctttttagtaattacttcttttggtctagagcaaaatggcacagcagacttttaaatcttcctccaaacttgtactcatagtaattccatttcttaaactaatgtcttgctggaaaattgacatgcttttagattgagtctgaaacagcagcttctgaggaaaccttgttcaacgcgtcccagcgcatcagcgagttagagaggaatgtggaagaacttaagcggaaagctgcccaaaactccggggaggcagaatatattgaaaaagtagtatatactgtgaagcaaagtgcagaagatgttaagaaggtacgtaaatctttgtaatttcagagctatgttgttaaaggagccaccagtctcctccttgcctgccttagagtaagggacatggacctaacagaaacagaattcatcagaaatatcaaatgacctgttttgcaacagccgtctttagaagtgtggatgggaaagaatatggaaatatctaataagtatgacctatgtcctcaaatccaaatttggacaagagtttagaagaacggaattaacttaggggtagaagtctcaaaacaggctttttttttttttttaaaccaactatattgacaaaaaccagtcatattgaacttttatttctgtgcggtagtcagttaaattcttcatggcatatagtaattatcaggccatttgagaatattttacaagcaggttggaacagagaacaggtagtaggaaaccaaatcttatctctttgagactcattttgaattaactacccctcacctctcattcgaaggcactatattttgcagagaaaaactcacacaacccaaatgtttaatcagaagccatgtaataactgaaacacatgttcagtttctcaataatgcttatttctaaagagaacattaaaaacttggtggcgccggggtggggcttaaaaccattgaatcactggtccccaacttttttggcaccaaggaccagtttcctggaagacaatttttccagactcgggggtggggatggtttcaggatgaaactgttccagctcagatcaggcattagattccataaggagtgcacaacctagatcccttgcatgcacagttcccaataggattcgtgctcctatgagaatctaatgtcaccactgatctgacagaaggtggagctcaggcaataatacttgcctgcccacccagttcctaactggtccgtaggcctgggggcacctgcatttactgacctaatttcagtatttaactccctactattcaaaaattttctggaagttactgtagcttttcgggcattacgtaagagtaactttccctacctctctctaggttgggaaagagaacaaaacaatgagaaaagttcactgccacaatatcagacagctgtcttttctgttttggtttgtgtggtttcctgcagtactgaggacacaaatttctcaagtactctgcttcagggcattttgcataatgacattttatcacaagagaaaggaacaaaatctcttgaaatgaaatttccataaatggctatttgaacagtttctaaaaagaatcatttgcattccaaccccacaccccatttctcttctcctcactcacttcttgcatatgctacaatctcacctttccttcctgtatcttttgtttaatctttttcctctgatttccttataagcaagtcttcacaaatcctaatttagtcaagatccaaagagcctccacttcttcaatatgggcttctctaatgtctaatctacttttgaaaaatctgcgcttctctatgtaatttgcaatacaattatgctacaacttttctatagaaaagtaataatcaggagaatgaggacttagccctaaggatttgctgcaactccagaattttttgaaatgttctttaaaatcatgtcaattttgcattcaattccactgtttgaagataaaattttaaattacttaccagtgaatatccttggtggcccttaatccagaatgcatgccatgattacactattgctcttaaatgtaattactgacactaacattaccacttctttctgtctaaatgtggaactatagactttagatggtgaacttgatgaaaagtataaaaaagtagaaaatttaattgccaaaaaaactgaagagtcagctgatgccagaaggaaagccgaaatgctacaaaatgaagcaaaaactcttttagctcaagcaaatagcaagctgcaactgctcaaaggtgggtcttttcacacaggcttattttttaaattactttaaggcatccatagtttatttaaaagtgaaaaatatattcactttgtcttgagatcatcatagtataaattgctcagactttatatatatatatctccccacagatttagaaagaaaatatgaagacaatcaaagatacttagaagataaagctcaagaattagcaagactggaaggagaagtccgttcactcctaaaggatataagccagaaagttgctgtgtatagcacatgcttgtaacagaggagaataaaaaatggctgaggtgaacaaggtaaaacaactacattttaaaaactgacttaatgctcttcaaaataaaacatcacctatttaatgtttttaatcacattttgtatggagttaaataaagtacagtgcttttgtatatattttggtgtacttgttactttcactgattgttgatgaatcccttttttcactgtaaacgtggatttataaacaa

SEQ ID NO: 1607 - DNA, 136 bp, Homo sapiens
tttaataaatggtgttgggaaaactggctagccatatgcagaaagctgaaactggatcccttccttacaccttatacaaacattaactcaagatggattgaagacttaaacgtaagacctaaaaccataaaaaccc

SEQ ID NO: 1608 - DNA, 18564 bp, Homo sapiens
gtttcagtgatgaacgccctctttgggcgtccccggataccgcctgacgtagtgccaatcacacctctcgcgtctcggcgcctcggaggctaatgaggacgcctggcgaaacgcagtaacggatttccgggtggaccttcgctttacggctcgtgagttcttccgcccaacccagaggaagcgggagagcagtttacgacagcgccggtcgtgtttacggcggcgcccgctgcgcgcgcatgtttcctcttttcctggtttctcaagagtgctgctgctaacgcggtccccggcacgcaccatctgttgccatcccggccggccgaggccattgcaggtgagcggcgtgtttcataggttcctgcggccctccggagccggttcggactaggtccagccttcggggggcctcccggaagagacctctcttagtcccttcctgctgttgccgtccctccgctgggcggggcaggaatccactttcgggggccccgcgtcccgcacgctactgaacgcgggacacgaccttgtgggtgaggtccttggccctcggccctgctcagtgcccatgagctgggtgaatttgattgtcacttaactcacctgggttaagacggaggggtaacaacaaagtctttctgaagtggccgaaaactccctgactttttgagtgaggtcttaggggtaccaggctgagcggtgtttggcccctgttcttaggaattcacagtgcataggttatctttccttttttgtgaaactggaggctaggatagagaagtagatttgatctctgatcttaaatctaccccaccccctgttcagcgatggacggcttatgatctgtagtggcctgccaaccacagagccccttctgagtgccctcttggaacctccctatcctgcccctgtgactagtacagctgttacttcgtttttgctgagcggctcagtttctcctcctggttccgctctgctcttaaaaaaaaaaacatttattaaagccagggtatctcatccctggctttccagggaggtgatgcaggtcgagcctcgggcctcttcccttcttgagcttctgacagaacccgattttttaaagtgtgttttgagactcgttgtcttggtattatgatgtacggtctcaaacccctgatctttgcgggctgctgcccagctgtaatataatggaaagaaggctggactgacagcaggcaaccctggaaatcaaatctgttttgaaatgatgaggtcagctgcttgagtaggctgagcttcaaatttttgcctctaaagtaggggtgggggggtggtcaatggtgttaaattatctggtatagggcctaacacgtaggagctcagcaatatttatttaatacaaattgttctgagaccaccaccctttttcttctgtcctcttcctatagtttctattagaaagatgaaacttctaggttcatcctgtgttgctgtcacccaaatgtcatctctgaaggaagcctcaatctccccagcatggggctttgaggagagtttactaagttcagcatacctgttcttttgattgctctccagcctccaagaaacatttgatttttgtttttttgagacggagtcttgctctgttgcccaggctggagtgtaatggcaggatcttggctcactgcaacctccgcctcctgagtagctggtattacaggtgcccgccaccacgcccagctaatttttgtatttttagtagagactgggtttcaccatgttgaccaggctggtctcgaactgctgacctcgtgatccgcccacctcggcctctcaaagtgctgggattacaggcgtgagccaccgcgcccggcctccaagaaatacttgtgtagtgaattttcctctaggaactcgccttctaagcattttcagaaggttacaacggaagataaatgcataggtttttttatagaagtgtcgggcagccatctgctatacagcgccggttttttaattcccaagagggctatagcattatgcagagtgcagactctggggtcagactgctttggttcacgtttttcatccactagcatttcaactttgggcaatttcttcatttctctgtgctttggttttcttatctggagagtgcggataacattggctcctacctcacaggattgttggcaggactgtatgaatgaatgagtggtaaacagtaagaacagtgcctggcagtattcatgaacatttaacatggcaactttgggcctgaggtctgtggggacctccttggccctctggcagttcttctgcctggctttatgtccgcttgcactgcacacaggatttgcgttgatggcagaaaattgaaacaatgagaaaggaaaattgaatttcaggatatacttaaagatctttttttctcagcactctatatacataaatgcacttttgcaagtctgaatacttgtgtggcattatacaaagtgcttagaacaaggatcttgtttattttgcagatggaaaagactaaggtggctggacgtggtggctcacgcctgtaatcccagcactttgggaggtcgaggcgggaggatcatttgaggtcaggagttcaagactagcctggacaacatggtgaaaccctgtctccactaaaaacacagaaaatagccaggcggcgcttgcctgtaatcccagctactcaggaggctgaggcaggagaatcgcttgaactcggaaggcggaagttgcacgccactgcaccccagcatgggtgacaaagtgagactctgtctcaaaaaaaaaaaagaaagaaagaaaagactactaagtcttagggaagttgagtttgtatgaattggtgaaggtatatctcagaaccaaaacaaggttactatatttgaaaaaacattaggacattttatcaaatctgacaccattaaatttttttaaacacttatgtaacacagaaaaagaaaaactaccaatcaatacaacaccctgtcaaacacaaggtgcagcctcattttaaagatgttacagtaaaaagagagtgtcgtggaattaatgaaatatgaaaaatcagttttgtttgcattcttctcagttttaagtacatattcacagtataattaacaaaaacagtagtagtcgctcaacagttgagggttccattttgcgtgttgctttttgagttctatcatttatgtctttgcttacttcatatggagggtgttttgtactctgaggccttcgttcatgccgctactcacatgatttatatttttcagattttggaagatggcaaagttcatgacacccgtgatccaggacaacccctcaggctggggtccctgtgcggttcccgagcagtttcgggatatgccctaccagccgttcagcaaaggagatcggctaggaaaggtacatgcctgtcagcaggagtctgaatctttgcagctgtggctgctactctcgagtccctgtttagattttattgtctcaaaatcttaactcctgaatttcttatagggatgccagctgagaaaggttatctctgggtgtagtcatagaagagctgggcacttacagaggtgttgtgaacaaattctgagactcttccacgctgtcctctcgcgctcagggatttctggttctgcagaaacttgcctggttgacctgtgcattctctgtcttttcttgttcttcgtaggttgcagactggacaggagccacataccaagataagaggtacacaagtaagtgtttctgcaactgaatgccccaatcagggccttgggaaagttgttctttattctaatgaccttcttctgaaagctttttagaatgggaagaaactgccaacaataattcataacttttagggatgtattctgggctttaacaataaccacatttttggaaatagccctcaaaacttagaccattcattaaagaggtctagcctattaaaatggggttttgggcccttttaaaaacctgttgaaaacattagctgggcgtggtggcgtgcacctgtaatcccagctactcgggtggctgaggcaggacaatcacttgaacccagaagttagaggttgcagtgagcagagatcatgctattgtactccagcctggtgacagagccagatcctgtctccaaaaaaaaaaaaaaaaaaaaaagtaaaacccctggttttaagatcctggtaccataaaaaggctttttctctctgccacttcagatagttggaggtggctgcctggagaactaagttaggatagctgaggctgagattggcaagaaagtatatcgtgatctattagacatacctgccatgggcccctgataatggagatggtggttagcaataaatacctcagattctcacacaataacgcagagagtgaaatgggttagtttgagtccttcagattcttggcttagaaagttctttaggccagagttgttcaaaattgaatgtgcatatgaatcatccggggatcttgttaaaatgctggttctgattcagtgggtatggggtgggactgtgagtctgtgtgtctaacaagctttcagccaatgctacaggtctcaagaccacacttgaaatagcaaggctttagactggtgcatatctggtaaagtctgtgggtgcagttactacatgccatcacctttgcctccagataagtactcctctcagtttggtggtggaagtcaatatgcttatttccatgaggaggatgaaagtagcttccagctggtggatacagcgcgcacacagaagacggcctaccagcggaatcgaatgagatttgcccaggtaggccaagagccagcaaccacaccatcttggggctgttactgttggccatcacctgctaaaaaatgctaccttgtgactcctaatgagagagggaagcatattataggtcttttcgtgaatctcgggtcaccgttccataacaagtggtaccaaggtgaacttgcactaggatcagggatgcatttaaatagtttatatttctgtttgccagtagctaggacatcagacttgtatgctaaaaacatttgtgctggataagaaggtgcacctgtgcctgttaccacacttaattgctgtgtgcagactttattaagtagatggtccagtcagattgcctattattatttaaagaggcaaactcagaaaatctaatgagacccagtaaacatacttcaatgaaaaatatatcatgggagtataggtctaagcaaagtccaagcacttaccccctaacacccccaagctgttgatgccgtagagtgaaagcacagagtaagatgtgaaacttgggatttggcatcctaaatttactccaaagacctcccacttgttctgcctattgtgagccaaatctccaagattttaacatggatgtttcttgctgatgcccagaggaacctccgcagagacaaagatcgtcggaacatgttgcagttcaacctgcagatcctgcctaagagtgccaaacagaaagagaggtgagattttcatcctgctggaacaagacacccttcccagactggccgtatttggaaaccacaggaccaaagcaggaggatggttgtattccccaccactgcaaaaaaggaaaatactttctacaaccagttaagcccccttttagcttgtcgttctcaggctggttcatggcagatagcatgggcaggaaactaactccttgtgctggtcatgcgcactaaagggaaacacaggcaggcaagaagaggctctggagcttacctgggctcagttctgctgtgggtcaactctaggaagccccctgtatgctggtcctttgagcctcctggtgttgtgtggtccagcggccactacaccccagattggaactatcagtgaacagtcactatagatgaagtaaaatcatctggtcagtatttggaggcagtgtaccttttctaacacctccagtatgcaccgtctgggtctcttcctttctctaagcccatttttcgtagtttaaaggagttagtggtgatggtaaggtttagctgaagagaatggcagcgtgtgccttttgaagaagccactggtttaaaggtctgcactgagatcatatgtctgtctttccagagaacgcattcgactgcagaaaaagttccagaaacaatttggggttaggcagaaatgggatcagaaatcacaggtaatgtatttataccagaattctgccttggaatttggttctgtttatttggttgtctttattaatagcttagatgagatatacttcacataccgtacaatttagtggtttttaatatatttgaagagttctgtaactggtcaatttcagaccattttcatcaccctcaaaagaatcccttaccctttagcagtcaccctgtcttgatctgttttccgttgctagaacagaatacctgagagtgggtaagttataaagcggtttctttagctcatggttctggggactgggaagtcccagatcaggagccacatctggtgagggcctcatgctgcttgatagcatggcagaaaaagcagaagcgggagcagggtgcaacagagaaaagggctaaactttgggtagttagcccattcctgagagaagggcatgaggcatttattccttttaacgacctaatctcttaaaggccctacctcccgacactgccgcagtagcaaccagattgccaaatgaattccaggaggcacacccaaacaccagcacccccagtagcccagcagtaggcagctatgaatctgttttctgtctcgggattttttgttctagacattttacataaatggaatcatacaatatgtggtctttagtaactggcagcttttatttagcgtgttttcaagagtcatccatgtggtagcatgtgtcggtacagttttccttcagtatatgaaagtctacacattctcaagtcccacattcggcctgtggtagccacatatatgaaaagtcggccctccatatactcggggtttgcatcccaagaatactgttttctttttcttttcttttttgagacagagtcttgctctgtcacccaggctggagtgcagtggcatgaatcttagccaactgcaacctctgcctgctgggttcaagtgatcctcctacctcagccttctgagtagctgagactataggcatgcaccaccacgcctggctaatttttgtattttctgtagatagggggttctgccatgttccccaggctggtctcaaactcctgagctcaagcagtccacccacctcagcctcccaaagtgctggggttacagccatgagccactgcgcctggcttgtattttcaatccatgtttgtttgaagaaaatctgcatattaagtagacccatgtacttcaaacccatgttgttcaagttcagctgtgcttcatctgttgttggtttttttggtttttgttttttgtttttttaagatggaatctcactctgtcacccaagctgcagtgccagtggcgcgatcttggctcactgcaacctccgcctcccgggttaaagtgattctcacacctcagcctcccaggtagctaggattacaggcacgtgccaacatgtctggctttttttttttttttttcatatgttttgtagagacagggttttaccatgttggcccggctggtttcaaactcctgacctcagatgatccacccacctcagcctcccaaagtgctgggattacaggcgtgaggcaccacacccagcccagatgagcttcttttcttgtttattgccaaataagagtcctttgaattatacatcatgttgttttgagccattcacatgctgatgaacatttgagttgtttttcactttttgactattattgatgctgctgtgaacgttcacctgcgtgtgcttgtgtgggcattctgagaacagaacacatgtaagcaaaagtgaagctacattttgttggatatgatgctgtatcaagaatagttaataacccgagagaaatataaaggaccttctacatgttcatcaggtgacatcattacctgggagtggaaccccatttgcttttgaacttttgatccctttggtcctcttccacaccataaattcctgggagtcagggattctgtcttataaaacagtcagcactccatttattgaataaaagctctttttcttttctctcttttattgagacgcagtcttgctctgtcacccaggctggagtgcagtggtgctatctcagctcactgcaacctccgcctcccagattcaagctgttctcctgcctcagcctcccgagtagctgggattacaggcatgcatcaccatgcctggctaatttttgtatttttagtagagatggggtttcaccatgttggacaggctggtctcgaactcctgacctcaggtgatctgcccgccttggcctcccaaagggccactgagcccctccgttttatgtggttgttgtttgagacaggatctcgtgtcactcaggctggagtgcagtagtgcaatcatagctcactgcagcctcaaactcctgggctcaagcaatcatcctgccccagcttcccaaagtgctgggactacaggcatgagccactgcaccaggccagctcttcatatttttagcctgtcttttatttatgttttgtatggactataacttttttttcctctaatggttttcaactgcagaaaccccgagactcttcagttgaagttcgtagtgattgggaagtgaaagaggaaatggattttcctcagttgatgaagatgcgctacttggaagtatcagagccacaggacatgtaagcagcatcttttactactttctacactgctcttatgtgtgtggaccagctggtgatgggtattttcttaagccctagtatttccaaaaaggctttgaagccacttactcaaaacacatttcataaggttaacagaggtatttgaaaaaaatcaagaccggccaggtgcagtgggtcacctgaggtcaggagttcaagaccagcctggccaacatggtgaaacccagtctctactaaaaatacaaaaacttagccgggtgtggtggcacacacctgtaatcccagctactcaggaggctgaggcacgagaatcacttaaaccctggaggtggaggttgcagtgagctgagatcttgccattgcactccagcctgggcaacaagagcgaaactccatctcaaaaaaaaaaaaatcaagaccaaggggaaaagcagaagttcactgactgcaaacttctttttaacttcctggtatcctgaggaaagaagaaatgagttatacaactcttttggcagaaagagaaagcagaatggaatttgctgattattaaactgtatatttctgtttcctggcatcctgagcaaaagagcaataagattaagttataaaactcttgtcaggaaaagaaacacagcaattcttcaggaggaatctttgcttctcctgacatttcaaatagcttcttacctcaaaggacaagtaggtggaatttaggtagtgggaaaccagagcaccagacgagaagtcagcctacccaggtgcttctataactagtcatctcctgtcttagcctcggtcaccctacctttaaaatgggggcgttgggctagatgagttgtgcttgctgtgttctatgccaggtgttaagtggacaggaactgagcaagcactgaggattcgtctctcctgctctggccagagattgctttccacctcttttagacttttggataagacttctggatgtatggcttaaaagaaaaaactgggggttatctctcttactttgcatgtctttgcctgctcttcccacagtgagtgttgtggggccctagaatactacgacaaagcctttgaccgcatcaccacgaggagtgagaagccactgcggagcatcaagcgcatcttccacactgtcaccaccacagacgaccctgtcatccgcaaggtgtgcgcctccttctgcccctctcccccttgttaggaatgctgtcggcttctacagctgaagctgcagaaagaacagaagacatgggaataacgtatgtattataggtaaaagcactttgccaggtagaccggaaatgtggatgttaagcacagctggacttgaagcccagttctgccgcgcttcctggcttagtctctggagccttagttctctcatctgcaacaaggggtagatgtacatagcactaccactggggcaaaggtgaaagcatctgaagcacttggctggaatctagcaggtgcttagggtgctgcagtgccactgccacccgaaacttgctggctcactggctgcagtgtttttggtcaatgaggtggggcctccttattaaggatttatgtggtcagcaaaggagttctttcccatccatgtgagtgggcagtgagacctgggagtgtctttccatcttctctctttgatcctctttgcagctggcaaaaactcaggggaatgtgtttgccactgatgccatcctggccacgctgatgagctgtacccgctcagtgtattcctgggatattgtcgtccagagagttgggtccaaactcttctttgacaagagagacaactctgactttggtaagaagcgtgcctggggagcaactcaaaggcattgagtatttttgttggtacagaacaagtctctggtactagagaatggatagaaagtggtctgtcttcccaagggaattgacagcagcagtgtctgaatctcccacactctttagaggttaggagaagagactgtcactgcagtacctgcttgaggcctcagcttttggagtcctcacagcaccctaatagcaagcttccaaatgttgcttttttgttgtttttttttttttttaattgagacagagagtctcactctgtcacccaggctggagtgcagtggcgcagtcttggctcactgcagcgtctgcctcccacattcaagtgattcttctgcctcagcctcccgaatagctgggattacaggcatgtgccattacgcctggctactttctatatttttagtagagacggtttcaccatgttggcgaggctggtctcgaactcctggcctcaagtgatccatcagccttggcctcccaaagtgctgcgattagaggtgtgagccaacacacctggcccaaatgttattcatttaaatacccctttttcgacttttgccatcttgcataccttgttcagtgtttgcttactgtatatacatatatattttttataccatacatatatgtatttatacaccataaaggaaaaccatgtcactcaaaaattaacaaaacaggctggacacggtggctcacaacctgtaatcctgccactttgggaggccgaggcggagaatcacttgacatcaggagatcgagaccaagcctggccaacatggtgaaacccagtctctactaaaaatacaaaaattagccaggtgtggtggtggacacatgtaatcccagctacttaggaggctgaggcaggagaatcgcttgaacccaggaggcagaggttgcagtgagccgtggacacaccactgcactccaacctgggtgacagagcaagactccatctcaaaaaaaaaagtgtttatattctgagcctgaagcctgaggtctttattaaaaagcttgcaaaatcattctcttgaggaatccaaaacgactgaaaagggacagcttcgttactgtgtgattgaattgaatgttggacagtatcttgagttatcctggagcagctgccccactcccccgcttatgtgttccacaccagggagacccactttaggagagggcagttctttgaaggaaggacttgtgttgtttgcctctccacatctccccacagcgctgcgcacattgtcagtgactctttgttgcatggtgagtgaccatgccacgcttttgcagacctcctgacagtgagtgagactgccaatgagccccctcaagatgaaggtaattccttcaattcaccccgcaacctggccatggaggcaacctacatcaaccacaatttctcccagcagtgcttgagaatggtgaggaaacgagtctctgggcattgattcattcttatttaatcagctgctgtttgtggagcatctgctttgtgctaggctcttggttgtgggactgagcaggtcagacgcagtccccacctttagcaggggagttacatgcctgggcttggatgttaggctctctgactttgaacaaagttcctgcccttacagaatttaatgatagtggaggaggaaacacagtgaacaataaataataaattgatttacatcaaatggtgaatatatgccatggcaaaaaaatgaagtagagatgagcatggttactaagtcattgttctaattcatcaggtgctaacagttgggaggggtcaagtaggcacaaaacaggcagcgagctcagagccccatcaagggccccaggaacctggccagggctgcaactaagcagaggtgctgggtctgactgattggccttggccttgtcaacaaagttagctctgtcttgtgacacctttgtttttgcaggggaaggaaagatacaacttccccaacccaaacccgtttgtggaggacgacatggataagaatgaaatcgcctctgttgcgtaccggtaggtcacctctctggtgggtattgtggccagactggagcacgggccccactctatagaatccccagtgaccacatgagtttcttttttgctgcagttaccgcaggtggaagcttggagatgatattgaccttattgtccgttgtgagcacgatggcgtcatgactggagccaacggggaagtgtccttcatcaacatcaagacactcaatgagtgggattccagggtgagccgccatctccatcaccctcctggtgacaccatgtctctattccctacagtgcctgtttacgcaggctaggttgtataaactgtttcttatcccctttcgttacttatagagctacctggatgtttttttttgtcttgtgagttttttcctctgcttagttccttgctgagaaagagcatgactgtgtgtgtagaactatgttaagtgttaagaacttttctgcttattttttacgcaggaaccagttaactcccttcttccagtactttcttcatctctgttccattgtggcctcctgttgacttctgctccctgagcatctgattttttcctctccttattatctgggttggcagttttcctgtaagtctggccgctcttctttttgacctcttctttcattgactgagccactgccttcaatcttttcacacattttttgcaattcctcatttctttaactcatggattctaagatctggctcagaattgactcttcagaggcaccttgaaagaaacatgcttccttcacttttcctcctctatttccaccccacccctcccaatccgcccccccgcccacatcacctgttgaaagagcacactggaaggtttgccgctctggggccagcggccttttcttggatttttcctggtgagctccccaaagcattcagggccgtcgtgcctgtgtcgttttgccgtctgtgttaccgcgttactctggtctcacccgtttccctgttccgtttgcatgtcgtctttgctggctcccctcctttttgatcccagtggagtcacctggacagctctcttcgccatacatacttctgtattatataactttgtattagttttctttcgcaccataacaaattaacagaaacttaatgacttaataccgatttatgtattttacttttattttttattttatttttctgaaacggagtttcgctcttgttgcccaggctggagtgcaacggtgcgatctcggctcactgcaacctctacctcccgggctcaagcgattctcctgcctcagcctcccgagtagctaggattataggcatgcaccaccacacccagctaattttgtatttttagtagagatggggtttctccatgttggtcagactggtcttgaagtcccggcctcaggtgatctgcctgcctcggcctcccaaagtgctgggattacaggcgtgagccacagcacccggcctaacaataccaatttattagctcacggttttgtaggttagaagtccagtgctgtgtgcttggtccttgtattagtccattgtcacactgctgtaaagaaatgcctgagagtgggtgatttataaagaaaagaggtttaattggctcacagttctgcaggctctagaggaagcgtggctgaggagacctcaggaaacttgcaatggtggcagaaagcaaaggagaagcaggcacatcatggccagagcaggagaaagagaggggggaggttggtatacacttttaaacaaccagatctcttgaatactcttaccacaagaatagtgccaaagggggaagtctgcccccatgatccagtcacctcccaccatgctcctcctccaacattggagtttacaatttgacatgcagtttgggtggggccacaaatccaaacaaggcagaaatcatggtgtcaatagaaatagaactgagttctcatctggaggttctgaaagaaaagccacttccaagcccattcttattgtgggtaaagttcatttccctgcagttagatgactgaggcccccatccccctgccagttgtcagctgggagcctctcttggctcctagaggccacctgcattccttgtcacatggccccctccatctccaagatagcaacagcacatcagatccttcttgtgcttcagatctctgacttcctccgtctccgacctctacacctagatttaagagactcatacggttgggtgagcccagccaggtagtgtatattaaggtaaactgatttgcggccttacatctgcaaaatcccttttgacatacaaggtaggatgatcatgggggtgatacttgatcctagccataggttctgcccgtagtcaaggggaggagactctgcaagggcaagggtcactgggggtcatcttagaattctgcccatcccaggcctcaaccatgaactctttgaaaatgatttctcaaatctactctgatttattatacttcccattgtttttctgctaaaacaccttccccttccatgtgtccccagtcccgtcattgcctctgggccagctgtccatcagcattgtctttcttccacctaagctctgagcctccaacatctccaacttcttttttacattattctgttttgctgttagcaaaatagaaggctttgctgtcttctgaatctgtcctggatttcactgataattgccctagttcagggccccatttcatcatgcctgtttgacatttgtctcctaactgatttctctacctccacccaacttctatatttgatttatctccgccagtcaattgtccaatacacgcttcatcagcagtgcagattgggagaagaattctaacatgccccagcaagctgtatgcagtagtatgcacctatagtcctagctactcaggagcctgaggtgggagaatcgcttgggttcatgagttcaaatcctgaactcaccagcttgggcaacatagtgagaccccatctccaaaaaatgtgccacagcaaactcacaggagtgctgcaggatattttaaattttttagggaaacacagagacatcttgtcagaatactaatacatggtttgaccctaactaaataaaaggaattcttggccgggcacggtggctcacgcctgtaatcccagcactttgggaggccggggcgagtggatcacctgaggtcaggagttcgagaccagcctggccaacatgatgaaaccccgtatctaccaaaaatacaaaaattggctggacatggtggcgggcacctgtaatcccaactactagggaggctgaggtaggagaatcacttgaacccgggaggcggaggttgcagtgagccaagatcgtgccactgcactccaccctgggcaacaagagcaaaactccgtctcaaaaaaaaaaagaaaaaaaatttaaaagaaattcttgagtatttcttttgccctgtgtttgccatgaaccaagaaagtttgggaacctctgtcatgtgacctttgaccagtcatttcactctgggtccaacttcccacgtctacaaatgatatgggtagaaaagaggatctctctggggtccttttctactgtgtgtgcatttatgtaaaatgtcagactcagctttgcacccactgcaggcttccacccccatctaaggccaactctgcctgtctttcctatcccaccatgcctctcagatcaagacctcctggctacacctgcacttgagccaatattctccacttggctcactgttacacgtcctctgtgaagcccttccttaccacgcaacacatagtaaacacttggctctgctgtttatatgacacttctaaagtgtgtgtgtgtgtgtgtgtgtccgtgtgtgtccatccatcattccctgtctaggcgagcttttagaagagaggaattgtaagtcgttgagtgactgctgtgcggcaggctgtgcaagggaagggactatgtctttgtctcttaaatggtaagatttagtgcgtacctacccactttctaagcaagcagactagggagttccttctctgccagaggaggtcccagcaccttgggcatttggagcttgcttctgtttctctaacggggctctcctgcagcactgtaatggcgttgactggcgtcagaagctggactctcagcgaggggctgtcattgccacggagctgaagaacaacagctacaagttggcccggtggacctgctgtgctttgctggctggatctgagtacctcaagcttgggtgagattcctgtgcaggagctggcagctgatcttgtgaaaggaagggtctgggtagggaggttgaccctcccctccccgtgtactggacaattgactggcagagataaatccaggggtggggtagagatggaggggtcagttaggagacaaatgccaaacagcaggcatgctgaatggagtcctgaactagggcaatggtgtcaatgaaatccagaactgagaactcagaagacgatgttttccctttcccttgaaaatagcagtggactgccgggcgcggtggctcatgcctgtaatcctagcactttgggaggcccaggctggcagatcacgaggtcaggagatcaagaccatcctggctaacacgatgaaaccctgtctcaactaaaaatacaaaaaattagccgggcgtagtggcgggcgcctgtagccccagctactcagggggctgaggcaggagaatggtgtgaacccgggaggcggagcttgcagtgagccaagatggcgccactgcactccagcctgggcaacagagccagactccgtctcaaaaaaaaaaaaaagaaaaaatagcagtggaccaggtatcaccatttaattgacatttgatcccaagtgttgctgtctctgtgctgccctgctctgaccactgatatcccttcccctgttagttatgtgtctcggtaccacgtgaaagactcctcacgccacgtcatcctaggcacccagcagttcaagcctaatgagtttgccagccagatcaacctgagcgtggagaatgcctggggcattttacgctgcgtcattgacatctgcatgaagctggaggagggcaaatacctcatcctcaaggaccccaacaagcaggtcatccgtgtctacagcctccctgatggcaccttcagctctgatgaagatgaggaggaagaggaggaggaagaagaggaagaagaaggtgtgtagcagcccactttctgaggtctagagtgatctgtgggctagcacgggagcaagctctgtagccattgtgatctttaaccttgataaaacttcgagaattccctgagacttaagtatgaagaagcattcactttggctccaagagcttcttctagagcctttagatcacatcaagtggttggggaggatagcggtgttttagagaagcggctggactgtggcagaggtagaggaagatgagggaagtcccagattgaagccggtggtctagagggaaaagctccgctccgggttaaatagcctgaaagttgtctctcctgctccaccagctggtgactgaaggaaatacctgcccagccctgtgagcatctgaaaggcttaacttcggaatggaagtgttgaaaactcacgcacagtccagcagaggttcagaaaggaaagtgaacatcatatcacacaacctggctcatttctcttacattttttgtgtctttcagaggaagaaacttaaaccagtgatgtggagctggagtttgtccttccaccgagactacgagggcctttgatgcttagtggaatgtgtgtctaacttgctctctgacatttagcagatgaaataaaatatatatctgtttagtctttccctcat

SEQ ID NO: 1609 - DNA, 140 bp, Homo sapiens
gagtgcagtagcatgatctcggctcactgcaacctccacctcccaggttcaagcgatcctcctgcctcagccccccagtagctgggattacaggcatgcaccaccatgcctggctaatttttgtatttttagtagagacg

SEQ ID NO: 1610 - DNA, 1628 bp, Homo sapiens
aaatcgcctgaagatagtctttcaaatttggacatttaaaaaagaaacttttactgtagtcatgaagtagtatcaaagtttaccacaagtttgtattgagagaagaacaaacaatatatgctaatatgaaaaacagctctacttagaaagctactgcttgggttttcttattaggcatagttctccagactgagttggttttactcatctacatgatttttccttgccttatggaacagaaattcaggcccactcgaattcagttattttagggctctttaaaatccagtatttgtgatttaaatgatgcggagggactttcattacctgtgtctttgcttatttctctctggccctcagaacaccccaccctgacctttaggggaaattgacagaggcagagggtttcacctgcctcaattgtcaccagccctgttacattcttccttccaagccttagcctcacagggaccttctcattattgaacaattgccttcaaagcagtagaatagcccaattgttatggagattaaagataccgattgcaaaactcctgtaaataaaatcttcactgacaaacccagtttcttttcataggcttttcttctgtaatctctttctggcagaacatctcatgttttgatgttagagattcagttaccaaccacagtaaataaagcaaaataataatagaaaaatagtatagaactcaccctaaaaacaaacattggccaaccatgtttattttttgtctctctttgcactcctgagaattgataggggaagaatgtaccacctctaattcaggtgatttctgattagcaagctatggaaagtcttcaggttgagttttagccagttcacgctcccctaaatggcatggaatagactattttctgttttaagaaaaaatagaacaatggcactaaatgcttgactgaatgtttgactaaatgttgactgaatcatggataggaaagattgggcagaaaagacagccactgcctccagacacaggatgccacaatcctgggcaccatcattattccatacaaccttagggtcatttttagggtttagaactttctcaatagggtttcaagattttgaaaagtgtcttccaattctgatctccgtagatcctgttatgggaattaacctttttggaaggggattcttgttcttaaagatgaaattccctactttctttcctggagggaatcagtatgggcagagggaagaggagatggcgattctgacctgtgtgtctcatgtcacctaacacctatggggtggcatgaaacttgagctttaaaacacaccaggggccaggcacagtggctcatgctggtaatcccagcactttgggagaccgaggtgggtggatcacctgaggtcaggagttcgagaccagcctgccaacatggcaaaaccccgtctctactaaaaatacaaaaatcagctgggtgtggtggcgggcacctgtaatcccagctacttgggaggctgaggcaggagaatcgcttgaacctgggaggcagaggttgcagtgagccgagatcaggccattgtactctagcctgggtgacaagagtgaaactccatctgaaaaaaaaaaaaaaaaaaa

SEQ ID NO: 1611 - DNA, 526 bp, Homo sapiens
gtagccacacagcagcctcaatgctttgctgcttaagtatttcttccacaaatatcctagttcatccctcttaagttctgcattccattaagtcctaggacacagacacaatttcacccagctctttgcaaccttatattttataaatatggcctttactccagtttccaataccttgttcctcatttctatctgcagcctcatcagaatggcctttaccagcattctaccagcactctggtcacatacacttaagtaatcacttaagtaatctctacgaagatttagacttcccctagttctaaggtcttctttcagagccctcaccagaattgcccctaatggcagaaccgttcttggcaatgcaggcttttttctagcctgctcctccaaacttgttcagccttcacggttatacagttccaaagccacttacacactttcaggtatttgttgtagtaacaaccccacatcttggtaccaactttctgtcttagttcttttgttaaatgcctgagactgggta

SEQ ID NO: 1612 - DNA, 8125 bp, Homo sapiens; identical to SEQ ID NO: 1504

SEQ ID NO: 1613 - DNA, 5786 bp, Homo sapiens
cgcaggacctcatgagtaagctgtggcggcgtgggagcacctctggggctatggaggcccctgagccgggtaagcgcgaatagatcaagcaatttaggtcgtgttagaaaagaagtcccgttcttgctcctcggagagtccagggtacttcggccacaggtggcaaggagaaaggcggtgctgttgttatggtaacagcgagtactgcgggaagggtgggatccagtaggggcttaggttattcagggcttcccctgccaccctccggccaaacactgtcgacaggctttccttccacaggagaagccctggagttgagcctggcgggtgcccatggccatggagtgcacaagaaaaaacacaagaagcacaagaagaaacacaagaagaaacaccatcaggaagaagacgccgggcccacgcagccgtcccctgccaagcctcagctcaaactcaaaatcaagcttgggggacaagtcctggggaccaagaggtgaggccaagagggtcatagttttataaggggaactttaggagcagagatagtagttagaagccgactgggctttctagaagaccgaatggacactgtgacttcagggtccagatttaggcagcaagagtctaagagggtggggaaagttgggtgtagctacggagtaggaggaggagacgcttgctcattttaaagagtagtgttgcttctctgcagtgttcctaccttcactgtgatcccagaggggcctcgctcaccctctccccttatggttgtggataatgaagaggaacctatggaaggagtcccccttgagcagtaccgtgcctggctgggtgaggatctggaggtggggaaactgggtttcttattatacccgcctaaagaaagaaggttggttctgaaatgggttaggattttccatgtcccagtattaactcagccaaattagggtgccccatctgaacaattctgtttttctttctccaacttccttcccagatgaagacagtaatctctctccctctccacttcgggacctatcaggagggttagggggtcaggaggaagaggaggaacagaggtggctggatgccctggagaagggggagctggatgacaatggagacctcaagaaggagatcaatgagcggctgcttactgctcgacaggtatgttggttcattgtttattcactcaccaaatgtatacagtattgagaactctccacgacccacgcactttgcgtggcattggggatatcgatagtagagaaaagacaaagtttctgttctcctggagctagtattctagtgtgtgtgttggggggctgggaagtaaataagtaaataatttcaaaaagctatatggtttatgacaaaaagaaaagggtgatgaaatagaaagtggcgtaaacaaacagatagaaatgatggaagagagacattagggtagttagagaaggcttctttgaagagataacatttgcaataccagaagagcttttgagcagagaccagcaggcgcacagaccttgagactggaacatgtctagcaaaggagaagaaaaagtggacaagccactgaagggctgtacgcagagaagtgacatacttggtttacatttcaatagattactttggcatctttgtagagaatgaatcttcgtggagacaagagatagaagtatggagaacaactaggaagctgttgaagtaatcagctgagaggcagtggttgctttaaccaagacgaaagtggtggagatggagaaaatcagatgaattatggctatattttggaagtagatacttgtggggaggggaatggagagaaaatatatcaaggctaagcctgggattttggcttgagcagttatccacctgatactctctattgagataagattaaaaataacaacagacctctgggaaagctggtacagttttggtgcacaggtcaggcaggtaacattactgatgcttctccccttgagagataaggacctaaagctaaatgtcaggagatctgggaggaggcagtatttatgaagaggaacctatggaaggtgtcctggagagggtgctcattaattaatatcccgcctccgaaggcctgcactgctcaagaccctgccttccatgtcccttctttcccctcccccgatctggccgacctcgcctctccatcttcctccattttcagacagcaccccgtctctgtctctccctagcgagctctgctccagaaggcgcggagtcaaccttcccctatgctgccgctgcctgtagctgagggctgcccacctcccgccctcacagaggagatgctgctgaagcgcgaggagcgggcgcggaagcggcggctccaggcggcgcggcgggcagaagagcacaagaaccagactatcgagcgcctcaccaagactgcggcgaccagtgggcggggaggccgggggggcgcacggggcgagcggcggggagggcgggctgcggctccggcccccatggtgcgctactgcagcggagcacagggttccaccctttccttcccacctggcgtccccgcccccacggcagtgtctcagcggccatccccctcaggcccgccgccgcgctgctctgtccccggctgtccccatccgcgccgctacgcttgctcccgcacaggccaggcactctgtagtcttcagtgctaccgcatcaacctgcagatgcggctgggggggcccgagggtcctggatccccccttttggctacgtaaggcccttaacccggactctgcgccccgtcccatgcccgctcttgagtatcttccccaccctattaaattacatccggtgcttcggcttgtacagaactgggggagtgggatgttgtgggcagaccagtctccggtatacacgtattttgcccctgtcggagcttgcgtcgatgcctggggcttggaaaccaccgcaaaaaaccaggctgcaaaccagcggaccgacttttgggactccgcctcttccagccgggattacctggcgtgcttcggcctttggcgtcattccgaaaacataccgcaagccaatcagcggcaaccttgctcttcggggcggctgttcgttggttgatatgccagagcctgttctgttgtctgtattggctattgccgctgtcagtcagggccgtgggtcgaaccttcacctactctttgtctgtacaagctcttgttgtctgggtgagcggcggaggcgctgctgtggattggtcacagggagaaacctctgatctgttcctattggcccgtccgtcaagggacgatgatgattggtagggcagagcaatctgagtcctagttggtggagttctgcccggatggaagctccggccgcggagtgatggtggcctcagcgaagatgggccgggcagggaccatggcggtggcagcagaggtggcaggggcggggcggctggcggtagaggaggctgtggtcctcagggggctgtaggtggaggtatggctcgggccagcagcgggaacggcagcgaggaggcctggggggcacttcgggcgccgcaacagcaggtatcccaatagctccaaaacctatcacgacagccatttgtctctttcccctttccttgtcccttccttttgggggtgggggaggaactcacggagccaaaggtactgtgaagttcctaaacatgtctcttccactctttgtctaaactttgtaacgtagatgcagctgactttgcctgtagcctcatagaacccatcccatggctgcagtggaagcttgcggtggctctccagtgaccagaggcatagtgaggtcccagggaggctccctctgtcttgcaacagttatttgtgatctttttctatgtgcctattgtcacaacagagtccggcagcgtcttctcttgagggagcaatttggagaagagctggaacccagactcgcgccctggatgccatcctttatcatccacagcaatcccatctggttgggagcactgctctgggtctcacactgcccctcctctatcctagggagcctgaggcccaggggtggaaagatccagttgcgggtggggggtagtgaaccgcgcaggataatgaaagcaacttgctttggaaatgacctaccgctacccgttgtctgagactgagattatctcagactgtcttctggcttctgccaaaacactcccttaacagaaagcaccgaggggatgggggtaggggggttggggagagtgaggcttgagtgtgaaggaagtctcatatatgcagagctgaaatctccctctttgtatgtccacacttttgtcttgttctctagactgattcttgctattccaaatcctcttccacgttgacagcccttcagatatttcaacactcctctcagcatcctccacttcccccatctctccaagctgaacttggttcacagggtgggattgtgtatgtgcatgcaggaggtgggggtggacagtgccctgggctggaatcccccttagttctaagtgcctccttgcccgcagcttcgagagctgtgcccaggagtgaacaaccagccctacctctgtgagagtggtcactgctgcggggagactggctgctgcacctactactatgagctctggtgtaagtctccaagagggctatttccaggtccctgtgtccaccctcccttggacctcagaatttcggccttcagggccccttctctgcatgaaagatgcctgagttgctccctccttgcctcttgcagggttctggctgctctggactgtcctcatcctctttagctgctgttgcgccttccgccaccgacgagctaaactcaggctgcaacaacagcagcggcagcgtgaaatcaacttgttggcctatcatggggcatgccatggggctggtcctttccctaccggttcactgcttgaccttcgtgagtgacttgatgccctgggtcagctaccagtggccctccccaaaccagaaccccaaatcgtctcacattcccttttccacacatttcaaagtatttttccctaatataaaaactagcaccctatacctggttgtcttcaaccaatcatgccaattttctcccctgcaggcttcctcagcaccttcaagcccccagcctacgaggatgtggttcaccgcccaggcacaccaccccccccttatactgtggccccaggccgccccttgactgcttccagtgaacaaacctgctgttcctcctcatccagctgccctgcccactttgaaggaacaaatgtggaaggtgtttcctcccaccagagtgccccccctcatcaggagggtgagcccggggcaggggtgacccctgcctccacacccccctcctgccgctatcgccgtttaactggcgactccggtattgagctctgcccttgtcctgcctccggtgagggtgagccagtcaaggaggtgagggttagtgccaccctgccagatctggaggactactccccgtgtgcactacccccagagtctgtaccgcagatctttcccatggggctgtcttccagtgaaggggacatcccataagtagttttgagagggtggatgggttacttgcccaccagaaacagccctagtcccaactccttgcgttcctttggcccctccctgcctacctagaatctgcctgaaagggctggagaggggcagtattgggggactgtgctagctttacccccgcaggacatacacaggagcctttgatctcattaaagagatgtgaaccagctacttgtg

SEQ ID NO: 1614 - DNA, 4332 bp, Homo sapiens
tagagttcaaaatgttttttccaatttatttagaaaaatagactctggattcacattcaccccagggctatgtgggatgacagcaaggagacacctgagatgaaatgaggaaggtttgaattactggtatccaaggggctgggggcaaaagccagaagcctttgtcccttcagagccagagtggcatgagtgtcttggctcccctcctctccctcccttcagtagtcttcagccatggccagtaagacaaggctggtccagccgtggaaagggcggcagcccatgcctcgcccatcgcggtcactgtactgctcccaaagaaagcctgtagcctggtactggcgccatacattgcctaccacgttggcacggagctcaccgtggagtttggcagcccgagcctggtgaggaccctccagatgcccatagtggtggagtgctcccaaagccaggtagttgacattgagccacacagcaccccgccagtaggggggatcatgctctgaattgcgctggccataaaaggagctggaggctgcaagggagcgtaaaccaaaggggctccagagatggcggctgtcggctagaatgtccagcaggggcccaaggcgggatgaggtggggtccagcagtcgcagcagcaagggaaaaagactgacatagccaagagcatctacatactgcagttgaggttggggccgacccaccacccgaacgagcccctgagggggcctgggcttcagctgtactgcttttgtgtggttcccaaagtctgcaaagactcctagctctggggcccagtgcagctcatccaggctctctgctgcctccagtgaggcagccagtgggcccagctcagcagctacctcagcctcacccagatgctctgccagccgcgtcagcacacgggcacccagtgccacccaacatcgcaggtccaggtgccgctcggttactgaagggtgtgaagcccgggggtagtcatccagcccagagggtagggtcttggggttcagtaaggttggtaaggcagggtcccgtccccgccagcggtaagatagtggcagtgggcctgcctggctctgatggagccaggaaaaccaggcatgcaggcggggcaaggcctttcggaggaaagccaagtcgtcagggtcaccaacctctagcatatgggctacaggcaaaagtagggttggggggttggcgtggactgctcgttgtactaggaattctggaggcacccgggctcgggcctcatcccccagtatctgctccctcccaatccagccatcagcatttagcagccccagccagtggccaagggcttcccgggtgagggagggatcccaccgctgaaccaccagctggtgaaagccttcatcccaaaggaagcctcgtgggaagaatgaccgggagggcactgctgtaaaaagaggtacgggtggaaagagggctgggtccaccttctgctcagacccttccaccccgatgtctggcaataccagcccttgtccgtagaagtagccaattccaccaaggaggccgctgagggcagcctgacccaaaacctgctcgccagagctcaggcccttctccttcagctggaaggtcttctcaaagcgctctctaaagccttcagcatggctctccagggcctgggtcagtagactgcctgccagtcttggcagggcttgatttcctcctgcctgggcactgcctgattcaaacacaaactctatggaaatgggaattttcagggtcacctgctgtatcaagaactgcccctgcccttgcccacttggacctctgtcctcccacttcagggatcctggcaagccgaggtagcgttcagggggggcccctgggggccgatgctgaaaccagctatttaggcgactctttaccatctctgtcagcaggggcagtcctgggttggaggtccagaagacattgtagcttgaaggggagaagataaataggaaatattattcaagagaaggcagtgggcattataaagagaaatacaaagtgttcaggagtcaggttgggaggtctcaggcaggggacatggagactggtgaaaatgggaataaccaccccttccatcccccaacattcttttcccccagttacctgccatacttgggggctgtatcccctggactggttggtggcaaaagtgtaaagcggaagtcaccaagttcactggtgtgcccactgataaacttcaactgccccttggccccaacctctggtagtaggacttccttgccatctgtcaccacatagaagaacagggagaccaaagggagggcagaagtacctgagtcctgagtgaccaacgaggacagaaaagaacagtgttagattggcattctctcttgaattccctcttgagaatcagccttagtgagggaaaggaacagtaggcaggggtaatgtaaacaacatacgtctggcagtaatgagggtcactgagggtaaccaggtacacccaagcgggatgagataaagagccttgcactgggtgccctgggagataacagtatacttttgtactatgtcctacactaagaactctacacagttgatttcatttaattctttttttttttttttttttttgaggcggagtctcgctctgtcgcccaggctggagtgcagtggcgcgatctcagctcactgcaagctccgcctcccaggttcacgccattctcctgcctcagcctcccgagtagctgcgacaataggcgcccgccaccacgcccagctaattttttgtatttttagtagagaccgggtttcaccgtgttagccaggatggtctccatctcctgacctcatgatccgcccgcctcagcctcccaaagtgctgggattacaggcgtgagccaccgcgcctggcttttttttttttcttgagatggagttttgctcttgttgcccaggctggagtgcaatggcacgatctcggctcagcgcaacctccacctccctggttcaagcaattctcctgcctcagcctcccaagtagcttggatcacaggcatgcgccaccacgcccggctaattttatattttcagtagagacggtgtttctccattttggtcaggctggtctggaactcctgacctcaggtgatccgccagcctcggcctcccaaagtactgggattacaggcgtgagccaccgcgcccagcctctttttcatttaattcttacagtcctgtgagttaagtgctattattatctacattgtacattttacaagcaaggaaatcaaggcttagagatggtaaatagaaatggttatacaggcagttgtttaaggcaggatttaagccaggcagccagagcccacttcatgctgcatttgctggcagcaagggaaggatggagggggtctgggctgagaaaagggtgtcctgaggccctgacctgaggctctacagtcactctccagctccagtcccctccgtgctgacccccaggcctcttgacgaactcagtggtgagccttaaggccccatcctggatgtgttggcgcccgaaggagaggccgtcgtggaactcccagccatagggacccacaccgtccccctgctcacacgtgtgcctgagcttaggagtccccggggtggtgccctgctgcgcccacatcagtcctgggggtagaatggccacgtaagtcaaagagcaggggacctgtccctccgggtctccgggtcatccctcttcataactctcctgatccattccttcccacccttgctctcgcttcaagctggggcgcccagattaggagtccgcctgcctgcccgccctggggcccggttaccggtgaggaggggcttcgggctgcgggtcttcatgccgaagtagacgtgagggcggtaggttccccagaagaggtccggggccacggcggggctggaggagtcggcaggcaacacaggaggcgcggagtgcagcgtgaccgcccgccgcgcacggtaccacgccagcacccagcgccccgacatacccagggccaaagacaggaccacgacggccagagccactcctccagccgtgctacgcggcccgccgccccggccgtcccgtcgcccggggcctccccgagccgccctctcggctgtccgcactccctctgccggcactgcgcggcgccgccgctcgccccgagccatcctggcactgaggtccgcgtcacaagagctcggagaggcggcagtggagcccgggtcctgcctcacctctccggctcccgcctctcgccctggcgaccaccgtccggttagcgacacctgccagccagcgcctgcgcctcc

SEQ ID NO: 1615 - DNA, 143 bp, Homo sapiens
tgagacggagtcccgctctgtcgaccaggctggagtgcagtggcgcgatctcggctcactgcgacctccacctcccgggttcaagcgattctcctgcctcagcctcccgagtagctgggactacaggcgcgtgccatcacgcc

SEQ ID NO: 1616 - DNA, 1936 bp, Homo sapiens
gaacttgagttagaagaacctcagctctgtagtgatcttattttactgttttcccaggataaaatgcccttggtaccacatactgtatgcagagtatttatgattgcttgagtacagttccttggaaaggacacaaggggtttcataaagcggtactaaaaatctgcttttctccctagcatttaccaacaaccttgcgatccgatggcttgaaataatggtcagagtgcatgttacccaacttctcctggctgctcctactctgtcacactgcacacagatcatgcccgccaccaccctacactccccgacctcacccaccagtcagacagtttaagtcctgctgacgcaccaggcgtgtgttggctcgtggttgtacttttcatgagtagcagggaagatacactccaggaaggtgggatacaaattattgaactgtgtgacttaaaagctccagtgagtttcgtcggaagtataggagtttgaaagtgctccccagtcaaacccagaactacatagggtcagccgtggttgagctaatttctgcttacacatgtgtggagggtgtcattttctgactacgcctaggcctgagtggacagccgattaaaagatgtaaattcgtggattgtatcaaggagagcgggttccatctttgtggtcaggagggggcccactcttttgttccgcaaagggtttatctggatgttccttgctggaagttgcttttccagtttggatcaaaccacttaagtggagctccagcctcagtccttgcaataaaaaaaaaaaagtcctggaaagccagaattttgctaatatcttacatagaatctcaatgatgggaattgggagtagaaggcagagagtggtgcttggctgatggaagttaaaagttgggttaataataaactacatttatatatcagttaacagcttgctaagtgcccacatattatttgagcttcatacttgcttgctgagaaagaatggctattattatcattatcatcattaccactttccattttatagataacaaaactgaggctctgagaatttaaagagattttccccaaatcattaaacggtgacttctgaatctggatatatgacaagacctctgtccccagtccccttgctttcacctctataatatatagtagctaagctcagctttctgagaacttccctgtcttatgtcatatttgacattataggagaattgaagatgttttgtaagtacatactttgtttactacctcagtagccagtataacaaatggcactgaagttttatgctttgcttgctaaaaccagcaccatttgtgaaacaggtcttggctccgagttacccttaaatgtaactcctttattataaaatcatttgcaaagagctgcagagatcaaggaatacactcttcccacttccctaatgccaggtagtactatgacaggacttcatagtaccacttcttcaacaaaataagtgtctgcagtgaaatatttgttaaaatgcacatttctcagtgaatatatttcttttaaaactgaaaaaaatagtacctaacggaaattttatcattgctttaaaatgtattttaatgaagatattaaaaaatacctttgatggattcttcaatattgtcgaactgctcaaaatgattatactgttatatgaagtctaaaatctttcatgcaacttacaagaatatttttgttgtatgcaacacagttggaaaattctagtgggaccatgtccatgcaattactgattatgtaatgctgtaaatttttgataagcatgttccaagttttcctgttctaaaaacaaaaacattaaaatcacccactgttgaagacaaaagatcattactttattaggagatattattagatatgtttagaactagttaaaaaaaaaaagtaaaagact

SEQ ID NO: 1617 - DNA, 1936 bp, Homo sapiens
gaacttgagttagaagaacctcagctctgtagtgatcttattttactgttttcccaggatagaatgcccttggtaccacatactgtatgcagagtatttatgattgcttgagtacagttccttggaaaggacacaaggggtttcataaagcggtactaaaaatctgcttttctccctagcatttaccaacaaccttgcgatccgatggcttgaaataatggtcagagtgcatgttacccaacttctcctggctgctcctactctgtcacactgcacacagatcatgcccgccaccaccctacactccccgacctcacccaccagtcagacagtttaagtcctgctgacgcaccaggcgtgtgttggctcgtggttgtacttttcatgagtagcagggaagatacactccaggaaggtgggatacaaattattgaactgtgtgacttaaaagctccagtgagtttcgtcggaagtataggagtttgaaagtgctccccagtcaaacccagaactacatagggtcagccgtggttgagctaatttctgcttacacatgtgtggagggtgtcattttctgactacgcctaggcctgagtggacagccgattaaaagatgtaaattcgtggattgtatcaaggagagcgggttccatctttgtggtcaggagggggcccactcttttgttccgcaaagggtttatctggatgttccttgctggaagttgcttttccagtttggatcaaaccacttaagtggagctccagcctcagtccttgcaataaaaaaaaaaaagtcctggaaagccagaattttgctaatatcttacatagaatctcaatgatgggaattgggagtagaaggcagagagtggtgcttggctgatggaagttaaaagttgggttaataataaactacatttatatatcagttaacagcttgctaagtgcccacatattatttgagcttcatacttgcttgctgagaaagaatggctattattatcattatcatcattaccactttccattttatagataacaaaattgaggctctgagaatttaaagagattttccccaaatcattaaacggtgacttctgaatctggatatatgacaagacctctgtccccagtccccttgctttcacctctataatatatagtagctaagctcagctttctgagaacttccctgtcttatgtcatatttgacattataggagaattgaagatgttttgtaagtacatactttgtttactacctcagtagccagtataacaaatggcactgaagttttatgctttgcttgctaaaaccagcaccatttgtgaaacaggtcttggctccgagttacccttaaatgtaactcctttattataaaatcatttgcaaagagctgcagagatcaaggaatacactcttcccacttccctaatgccaggtagtactatgacaggacttcatagtaccacttcttcaacaaaataagtgtctgcagtgaaatatttgttaaaatgcacatttctcagtgaatatatttcttttaaaactgaaaaaaatagtacctaacggaaattttatcattgctttaaaatgtattttaatgaagatattaaaaaatacctttgatggattcttcaatattgtcgaactgctcaaaatgattatactgttatatgaagtctaaaatctttcatgcaacttacaagaatatttttgttgtatgcaacacagttggaaaattctagtgggaccatgtccatgcaattactgattatgtaatgctgtaaatttttgataagcatgttccaagttttcctgttctaaaaacaaaaacattaaaatcacccactgttgaagacaaaagatcattactttattaggagatattattagatatgtttagaactagttaaaaaaaaaaagtaaaagact

SEQ ID NO: 1618 - DNA, 1932 bp, Homo sapiens
gaacttgagttagaagaacctcagctctgtagtgatcttattttactgttttcccaggataaaatgcccttggtaccacatactgtatgcagagtatttatgattgcttgagtacagttccttggaaaggacacaaggggtttcataaagcggtactaaaaatctgcttttctccctagcatttaccaacaaccttgcgatccgatggcttgaaataatggtcagagtgcatgttacccaacttctcctggctgctcctactctgtcacactgcacacagatcatgcccgccaccaccctacactccccgacctcacccaccagtcagacagtttaagtcctgctgacgcaccaggcgtgtgttggctcgtggttgtacttttcatgagtagcagggaagatacactccaggaaggcgggatacaaattattgaactgtgtgacttaaaagctccagtgagtttcgtcggaagtataggagtttgaaagtgctccccagtcaaacccagaactacatagggtcagccgtggttgagctaatttctgcttacacatgtgtggagggtgtcattttctgactacgcctaggcctgagtggacagccgattaaaagatgtaaattcgtggattgtatcaaggagagcgggttccatctttgtggtcaggagggggcccactcttttgttccgcaaagggtttatctggatgttccttgctggaagttgcttttccagtttggatcaaaccacttaagtggagctccagcctcagtccttgcaataaaaaaaaaaaaagtcctggaaagccagaattttgctaatatcttacatagaatcccaatgatgggaattgggagtagaaggcagagagtggtgcttggctgatggaagttaaaagttgggttaataataaactacatttatatatcagttaacagcttgctaagtgcccacatattatttgagcttcatacttgcttgctgagaaagaatggctattattatcattatcatcattaccactttccattttatagataacaaaattgaggctctgagaatttaaagagattttccccaaatcattaaacggtgacttctgaatctggatatatgacaagacctctgtccccagtccccttgctttcacctctataatatatagtagctaagctcagctttctgagaacttccctgtcttatgtcatatttgacattataggagaattgaagatgttttgtaagtacatactttgtttactacctcagtagccagtataacaaatggcactgaagttttatgctttgcttgctaaaaccagcaccatttgtgaaacaggtcttggctccgagttacccttaaatgtaactcctttattataaaatcatttgcaaagagctgcagagatcaaggaatacactcttcccacttccctaatgccaggtagtactatgacaggacttcatagtaccacttcttcaacaaaataagtgtctgcagtgaaatatttgttaaaatgcacatttctcagtgaatatatttcttttaaaactgaaaaaaatagtacctaacggaaattttatcattgctttaaaatgtattttaatgaagatattaaaaaatacctttgatgaattcttcaatattgtcaaactgctcaaaatgattatactgttatatgaagtctaaaatctttcatgcaacttacaagaatatttttgttgtatgcaacacagttggaaaattctagtgggaccatgtccatgcaattactgattatgtaatgctgtaaatttttgataagcatgttccaagttttcctgttctaaaaacaaaaacattaaaatcacccactgttgaagacaaaagatcattactttattaggagatattattagatatgtttagaactagttaaaaaaaaaagtaaaa

SEQ ID NO: 1619 - DNA, 6584 bp, Homo sapiens
cagattgcttccaagtatgatcatcaggcagaagaagatcttcgcaattggatagaagaggtgacaggcatgagcattggccccaacttccagctgggcttaaaggatggcatcatcctctgcgagtgagttacagccctccagaatctgtttctgctcttccagttctttccacagccttctctctcactctccttctcagcccagggtgtcagaccttgatattctacagatatctttaatgctttcccttactgatgctaaagggagcaacttgatatttcaatccttgtttttgtgtgccagtaaataagatgtctctcatatttttcttttcagacttataaacaagctacagccaggctcagtgaagaaggtcaacgagtcctcactgaactggcctcaggtaacagccaaaccaaccacctctggttctagttggttgcattttatgtagtgaaaacttgatttcaggtttggttttttggttttgtgttttttttttttttaactttttgattacggtttttacatagacattgtagcagaaatttgtgcatatttaattttttgcccttttgtaatggttctgtaattacttatttaactagttctgtaattattatgtttagcttagaagttttcctatatttagtctgtgtacattcagaaaggacttgacacagcttacacagagaaatgcaacccagaccttaaggataagggaaaaaacaaggcattccacataactaacagtggactgcagagcactgtatcagacataaccttagttcatgagtgtgtatgaggaaggaaaatgggatacttactggtcttgaacatgtgtttggagatatgagagaatgagtatttagtaaccacaaatgtattctgaaattaaaataacacataatgaattatttattagtatgagtaattatataccttttgacaaataaaattccaggcctggatagctctgatacagaatccttttaaaatatataaggaagatcttgcccataaaaactgaaaacacgtaactgcttaaaaatattaagactgtgatgtgacccacagtgagagacacactctcttcttgctctttcctgttccagagagagccatgcttagtatgtatttggttgaatccttgtcaaacagctttctgggcagcgtcttataactggttatgaagacttggaattcttagaaattatgaatgtcaatatttagctccagaaattataaaactcttcttctttatagttggagaatattggcaactttattaaagctattcaggcttatggtatgaagccacatgacatattcgaagcaaatgatctttttgagaatggaaacatgacccaggttcagactactctggtggctctagcaggtctggtacgtacatgtctttaatggctggttgacagattcccaccacattggtgatgaattgcatcattgctttttcatgggggttcagaccaggtggggcggggcctgtctcttctgtaattagtagctttgtggaaaggctgctgacatcagctgcatcgtactagatagcttacttagaacactcacatttcaaatgatgcagtatattattgaacagccttaaatactttttatctctagtttgggcccctttgtctatggacatatcatttctttgttgttccttctgtgaaactctgttggccttttcagttagtgtgcatgtttctgtctaggctaaaacaaaaggattccatacaaccattgacattggagttaagtatgcagaaaaacaaacaagacgttttgatgaaggaaaattaaaagctggccaaagtgtaattggtctgcaggtaagtaatgtggtgttgcttattcaattacttattcaatatgattaattctcaccatgcaaaatattaagcctctcctaagaatagatagaagtactatagtactggggggggtgtagtttatacaatttatatctatttataaagcccataagacagtgataattttttagaggaaacctcaggtatgccacctgacttgacaattatttctccaggaaacgaaaatttttaattgaatcatattgtcttttttttttttttttaaaagaaaaatacacttttaaattttttattttatctttttttttttgagacagagtctcactcttttgcccaggctggagtgcagtgacgcgatctcggctcactgtaacctccacctcctgggttcaagcaattctcctgcctcagcctgccaagtagctgggattatgggaatgagccaccatgcccggctaagttttgtagttttagtagagataggatttcaccatgttggccaggctggtcttgaactcctgacctcaggtgatctgcccgcctcggcctcccaaagtgcttggattacaggcgtgaactactgcacctggcctgttttatcttttatatatagatgggatctcactttgttgcccaggatagtctcaaactctggagctcaagcagtcctcctgccttggcctcccgaagtgctgagattacaggcatgagctaccacacccagccagaaatgtactttataaattccttaatgttattgaccaaattaggcaattttacacgaccttaatgccaaagtcacttatttacagtaccaaatcatgatatagcagccaagccctgttagaatttgtcagtttaaattcttctgaaatacgtagttcagatgttttccttctcttcattgttctcttcactggtcatggaaacgtcattgctaattccccaaatgctgttggctttactctccaaaagccactgtacctgcttgatacagtgcccctttctactgagtctatgcaagttagatttatttttacacagtacaaaattgtattggtggtgagaaactggaaacctaaatttcagaacagtagtcagttggttgaattacaactccataaaagcaaagtgtaatgtaaaattatacactagagtttgaaaagataggttatgggggaaaaaaatcagatcatcaaatactgtggtcagtatggatttttaaaattaaaaatgcacatgtttttgtatgtatttgtatatatgtgcatctatagatatatacatagacacataggttaaaaagctaaaaggatattcacaaatgttgacagtgaatggatggtggtatcacaatgatttttcccccctcctttttgcttatatgtgttttctgaattttcttcaatgaacagattttatattagtaataaagattttctttaatcttatttttaaagaaaaaatatccaacatcagaaaagtgtgcctaaccagtggaacagggtgtaatggttggtcctgaagccatactgttctcagtggggaagaaaaattaattattgtttccctgaactttgctgagttcaaattcctcattccacctttctccagctctgtccaaggacatgggagttacaggaataaaatgtggttcctttctggagaaaatgttggtgattttgaaactttaaaaagcccttgttaagctcccagagaaaacacttggcatttgctttcacattttatgtaaaacattcctggagtagaacagcatattgcttggcctaggattacttctgttgaaataaccgaagctggtacctcttaatttggttatctggggaaagagtagcagaggaaattattctgccactgtaatgacttttggtgtgtcagtccacctgttaaagtgtgtttaattcttctatgtatgagtttttatctatagtgactttaaattttctttttaaagttagcacttgaaatttgtttgtagacacatagaagagttgactggagcctcagctcagtaacttgtcggttgtgccccttctgtctttttggtagcatggaaagttttgtttgtgttgtgtatattgttgacatctgataatttgtgcaattttatttttaacttaaaagatgggaaccaacaaatgtgccagccaggcaggtatgacagcttacgggactaggaggcatctttatgatcccaaaatgcaaactgacaaaccttttgaccagaccacaattagtctgcagatgggcactaataaaggagccagccaggtaagcaatacctttttatacgtgtacaagagtacacttaccttatttttattaaccagaagtttaaagtaggtattttttgtatagtttatttagagtatattccttcaggaatgtggactttgctgggaaagcaaaataatcaaaagaccttttcgatagcagcaaaagcatgatgtgtctcgtggtttttgttggcagttagaacagctggcctttctacctagccagcagaaaaaaagatatgtttattacagtgttcttgctccaaaatccaagtaaaatattgctcatttaaatgctgacttttttttttaaggagcccttaattaataggtaaaattacctggtgttccactaagaaggatttaactagcattcctattagatgtgtcaatataaggagatggaaatgcaacatggtgaaaataccagtataccacatccaagatagaaatatttccttgttaaaaatagatcaccagcacctcagaaggaagttcaacaaccatttgagaacagacaggtctcacatccaacaacagctgggatagggtttgaaaaacattttcttaccgagtccaagggagatttatcaaactttgcccttatggaacacatcctaccgggtgcggcattatgtctctcatagctgccactcacgtttacttttctacccactctgaacctggaagtgtgtgcttgatgtaagtagagagatgaagtatgagttactgtactctgaaaaagaggggagtggctgtgaagtggctggttcttctgtatctcagccttttgaaaagactcaagtccttaagatctgctcaacatagtttctgttgaatatattataaatttttgaaattggtaacccagataatgtatgtggtccccatgggcattcacatggaactttctggtgtggaagcattatgatttcacattctttatgtctcattctctcttaaatccagagtaggtagtaatgtctccattttgcagtttgagaaacctaaagctaaatttacgtgtttgaggccacatagtaattttatagcagagcaaggattttgaagaaaggtctcacctagctcaaaagccaatgaatattgcttcatggaagtgattcggtatcaggatattttggttaagctagctttacccctgaaccaaatgaaagttcatgtattactgttcatattcaatgtgaattctataatttataaattattcacaagaatagattctagctgctgttttaacttttatactatgttctaataccaggcagggatgttagcaccaggtaccagaagagacatctatgatcagaagctaacattacagccggtggacaactcgacaatttccctacagatgggtaccaacaaagttgcttcccagaaaggaatgagtgtgtatgggcttgggcggcaagtatatgatcccaaatactgtgctgctcctacagaacctgtcattcacaacggaagccaaggaacaggaacaaatggttcggaaatcagtgatagtgattatcaggcagaataccctgatgagtatcatggcgagtaccaggatgactaccccagagattaccaatatagcgaccaaggcattgattattagatccacacagaaggagctcagtatttagtcctttgtttttattcagtgagaaccaagctagccttgagtaatttttatcttgtcttcctaaaacactattaagcttattgtacttttaagaaaaattgccttacgtacattcctttttcctttttctgcctcttccctcaatagttgccttttagtgctgtaatagttaaatcctacagcataatcaataactcgcatatgaagtaaaaaggaatactgtgaaaggggagtactcttgtacagccagttcttttatgcaaaaatctatgcatttttacaatcttatattaaactggtattttcaaacaataggaaactttttttttttttttttttacagtttagtgtatctggtttctacatggaagactaaactcatgcttattgctaaatgtggtctttgccaactaaatttaagatgcagcattttagaaatttacatatcaatgtttctacagtattgtttgctaatttttaaataaagtcatgatcagtgtgcatttgtgattatatgtgtactcattctcttacctagcgaacaagatcttttcagagtggtgtttctaaaagagcatgtacaaaagtggcctgtggacatttaggcctgggtgatgcatttgctcttcctgtttgtgccaatgtatcaatgtagagttgctctgttttcttcaactgtatttattgctgcatttctcagcataaacttatcccattgtattttttataaataaatattttttttgaactttcatatgaaccacaggctgatta

SEQ ID NO: 1620 - DNA, 2582 bp, Homo sapiens
ggaaccaacaaatgtgccagccaggcaggtatgacagcttacgggactaggaggcatctttatgatcccaaaatgcaaactgacaaaccttttgaccagaccacaattagtctgcagatgggcactaataaaggagccagccaggtaagcaatacctttttatacgtgtacaagagtacacttaccttatttttattaaccagaagtttaaagtaggtattttttgtatagtttatttagagtatattccttcaggaatgtggactttgctgggaaagcaaaataatcaaaagaccttttcgatagcagcaaaagcatgatgtgtctcgtggtttttgttggcagttagaacagctggcctttctacctagccagcagaaaaaaagatatgtttattacagtgttcttgctccaaaatccaagtaaaatattgctcatttaaatgctgacttttttttttaaggagcccttaattaataggtaaaattacctggtgttccactaagaaggatttaactagcattcctattagatgtgtcaatataaggagatggaaatgcaacatggtgaaaataccagtataccacatccaagatagaaatatttccttgttaaaaatagatcaccagcacctcagaaggaagttcaacaaccatttgagaacagacaggtctcacatccaacaacagctgggatagggtttgaaaaacattttcttaccgagtccaagggagatttatcaaactttgcccttatggaacacatcctaccgggtgcggcattatgtctctcatagctgccactcacgtttacttttctacccactctgaacctggaagtgtgtgcttgatgtaagtagagagatgaagtatgagttactgtactctgaaaaagaggggagtggctgtgaagtggctggttcttctgtatctcagccttttgaaaagactcaagtccttaagatctgctcaacatagtttctgttgaatatattataaatttttgaaattggtaacccagataatgtatgtggtccccatgggcattcacatggaactttctggtgtggaagcattatgatttcacattctttatgtctcattctctcttaaatccagagtaggtagtaatgtctccattttgcagtttgagaaacctaaagctaaatttacgtgtttgaggccacatagtaattttatagcagagcaaggattttgaagaaaggtctcacctagctcaaaagccaatgaatattgcttcatggaagtgattcggtatcaggatattttggttaagctagctttacccctgaaccaaatgaaagttcatgtattactgttcatattcaatgtgaattctataatttataaattattcacaagaatagattctagctgctgttttaacttttatactatgttctaataccaggcagggatgttagcaccaggtaccagaagagacatctatgatcagaagctaacattacagccggtggacaactcgacaatttccctacagatgggtaccaacaaagttgcttcccagaaaggaatgagtgtgtatgggcttgggcggcaagtatatgatcccaaatactgtgctgctcctacagaacctgtcattcacaacggaagccaaggaacaggaacaaatggttcggaaatcagtgatagtgattatcaggcagaataccctgatgagtatcatggcgagtaccaggatgactaccccagagattaccaatatagcgaccaaggcattgattattagatccacacagaaggagctcagtatttagtcctttgtttttattcagtgagaaccaagctagccttgagtaatttttatcttgtcttcctaaaacactattaagcttattgtacttttaagaaaaattgccttacgtacattcctttttcctttttctgcctcttccctcaatagttgccttttagtgctgtaatagttaaatcctacagcataatcaataactcgcatatgaagtaaaaaggaatactgtgaaaggggagtactcttgtacagccagttcttttatgcaaaaatctatgcatttttacaatcttatattaaactggtattttcaaacaataggaaactttcttttttttttttttttttttacagtttagtgtatctggtttctacatggaagactaaactcatgcttattgctaaatgtggtctttgccaactaaatttaagatgcagcattttagaaatttacatatcaatgtttctacagtattgtttgctaatttttaaataaagtcatgatcagtgtgcatttgtgattatatgtgtactcattctcttacctagcgaacaagatcttttcagagtggtgtttctaaaagagcatgtacaaaagtggcctgtggacatttaggcctgggtgatgcatttgctcttcctgtttgtgccaatgtatcaatgtagagttgctctgttttcttcaactgtatttattgctgcatttctcagcataaacttatcccattgtattttttataaataaatattttttttgaactttcatatgaaccacagctgattatttt

SEQ ID NO: 1621 - DNA, 2579 bp, Homo sapiens
ggaaccaacaaatgtgccagccaggcaggtatgacagcttacgggactaggaggcatctttatgatcccaaaatgcaaactgacaaaccttttgaccagaccacaattagtctgcagatgggcactaataaaggagccagccaggtaagcaatacctttttatacgtgtacaagagtacacttaccttatttttattaaccagaagtttaaagtaggtattttttgtatagtttatttagagtatattccttcaggaatgtggactttgctgggaaagcaaaataatcaaaagaccttttcgatagcagcaaaagcatgatgtgtctcgtggtttttgttggcagttagaacagctggcctttctacctagccagcagaaaaaaagatatgtttattacagtgttcttgctccaaaatccaagtaaaatattgctcatttaaatgctgacttttttttttaaggagcccttaattaataggtaaaattacctggtgttccactaagaaggatttaactagcattcctattagatgtgtcaatataaggagatggaaatgcaacatggtgaaaataccagtataccacatccaagatagaaatatttccttgttaaaaatagatcaccagcacctcagaaggaagttcaacaaccatttgagaacagacaggtctcacatccaacaacagctgggatagggtttgaaaaacattttcttaccgagtccaagggagatttatcaaactttgcccttatggaacacatcctaccgggtgcggcattatgtctctcatagctgccactcacgtttacttttctacccactctgaacctggaagtgtgtgcttgatgtaagtagagagatgaagtatgagttactgtactctgaaaaagaggggagtggctgtgaagtggctggttcttctgtatctcagccttttgaaaagactcaagtccttaagatctgctcaacatagtttctgttgaatatattataaatttttgaaattggtaacccagataatgtatgtggtccccatgggcattcacatggaactttctggtgtggaagcattatgatttcacattctttatgtctcattctctcttaaatccagagtaggtagtaatgtctccattttgcagtttgagaaacctaaagctaaatttacgtgtttgaggccacatagtaattttatagcagagcaaggattttgaagaaaggtctcacctagctcaaaagccaatgaatattgcttcatggaagtgattcggtatcaggatattttggttaagctagctttacccctgaaccaaatgaaagttcatgtattactgttcatattcaatgtgaattctataatttataaattattcacaagaatagattctagctgctgttttaacttttatactatgttctaataccaggcagggatgttagcaccaggtaccagaagagacatctatgatcagaagctaacattacagccggtggacaactcgacaatttccctacagatgggtaccaacaaagttgcttcccagaaaggaatgagtgtgtatgggcttgggcggcaagtatatgatcccaaatactgtgctgctcctacagaacctgtcattcacaacggaagccaaggaacaggaacaaatggttcggaaatcagtgatagtgattatcaggcagaataccctgatgagtatcatggcgagtaccaggatgactaccccagagattaccaatatagcgaccaaggcattgattattagatccacacagaaggagctcagtatttagtcctttgtttttattcagtgagaaccaagctagccttgagtaatttttatcttgtcttcctaaaacactattaagcttattgtacttttaagaaaaattgccttacgtacattcctttttcctttttctgcctcttccctcaatagttgccttttagtgctgtaatagttaaatcctacagcataatcaataactcgcatatgaagtaaaaaggaatactgtgaaaggggagtactcttgtacagccagttcttttatgcaaaaatctatgcatttttacaatcttatattaaactggtattttcaaacaataggaaacttttttttttttttttttttttttacagtttagtgtatctggtttctacatggaagactaaactcatgcttattgctaaatgtggtctttgccaactaaatttaagatgcagcattttagaaatttacatatcaatgtttctacagtattgtttgctaatttttaaataaagtcatgatcagtgtgcatttgtgattatatgtgtactcattctcttacctagcgaacaagatcttttcagagtggtgtttctaaaagagcatgtacaaaagtggcctgtggacatttaggcctgggtgatgcatttgctcttcctgtttgtgccaatgtatcaatgtagagttgctctgttttcttcaactgtatttattgctgcatttctcagcataaacttatcccattgtattttttataaataaatattttttttgaactttcatatgaaccacaggctgatta

SEQ ID NO: 1622 - DNA, 4114 bp, Homo sapiens
tccttatcttaaaaaggtttatttattagttgtgcacttacaaacttacctcagttcttacatagtgtactttgtaagttgatgcatataaacatggttttagaagagtttttctgtcctaatttgtacaaaaaaaggtaaactaatatagttccagtattgttacctggtcaaacaataatgacaaagacaatgaggaagaatagggtttattaggtcttttaaaaaaaaattcactaacttttctctagtggtctcatcttctattctgtaaatggctcttagaaggaaatgttttccaggtacagatacctaaatgggtatctatctcacaatggcctggagttctgttccctcctcattccttaatgagtgcttgtcctgctgtgcccttgcattgtttaatttgttgctcctttttacgaaactctgaaaaacaaaagaacaagttagaatagtattatgtgtctgtactgttgataacgtaggggccgagggaaaacttctcctttgccctctgacggtttgctgaagaattaacttacaaaaggcagattaacaggagaaatggcatataaagtagcacaggggagaatcacagtgagtgtctaaatggggtacagataattctgtttttgggaaagggagatggggaagtgtggatgattttatgggggtggtgaattacttttaggggagtttaatgagcttgaagaacacttagtggctgggaacaaagtctgttgggcccacaggacagtggtttgtgacaaaagtctgtccaggtgtgttgactgaatttagtctttgtttctgctatataagtccagttaatggaaaactcagggaaggggccagaggtggtttttttctttggtgggtctggactttaggcagataaggggatttcattcagatgacagcttcatcctgtgctttgggagaaggtcagagagttcttgaggcttcttcagttcagcatgtcaaagtgccatattatggagtatcaatttctgagtcccaatgatagccatttacaagttcttggccttaaatttcagataactggatccttaagaaagtttcttctgttgaaaaaactattttaaggggtaaatttcaaggtggattttttttgggggggaggtggtggagacggagtcaccctctgtcgcccaggctggagtgcaatggcgccatctcagctcactgcaacctccacctcccgggttcaagcgattctcctgtctcagcctcctaagcagctgagattacaggcgcctgccactgtgcctggctaatttttgtatttttagtagagatagggtttcaccatgttggccaggctggtctcaaattcctgacctcatgtgatccacctgccttggcttcccaaagtgctgggattgcaggtgtgagccatagtgcccggatttcaaggtggatttttaactggaaaagtaaatcaggggatggagacctggctagctacataccaccatcataagcactttccttagagtacatacaaataagtcaataaacaagtaaaaagtaaaaattgtattttggctgagtgcggtggctcacaactgtaatcccagcacttgtgggaggccgaggcagatggatcacctgaggtcaggagttcaaaaccagcctgaccaacatggtgaaaccccgtctcttctaaaaatacaaaattaggcgtggtggtgcacgcctgtaatcccagctacttgggaggctgaggcaggagaatcgcttgaacctaggaggtggaggttgcggtgagctgagattgcgccattgcactcaagcctgggcaacaagagcaaaactctgtctcaaaaaaaaaagtaaaatttgtagtttatgttttatatggagaaggatgaggatacattaattataaattgtagaagtggttcttaaaaaattgagtgcctgctgaaccaaagagtgcattaaatgctctgtttaaagctaaaagggctttaacacctaatttttatggcaacagaatgaaagaaaagtatgcaaatatcatataactcagacaaggaaaagagatgagacatcattcagctgttaaaatatccctgtctacccaggataaggcaaataagcaacaactgtgttgcaaaggctgttgcaaacagctgcctgctatttccagatataagcagtatgggcgctccgctgagggtgtggcttttctcacactggtgtgcctgggctaataaagggcctgagaattgcagatctgtcaatactggcacagaggagcacacaagtgtgctctccctaatatagtgggtatgaacatcatgcttggagatgcaaaaatgctttagaaaaagatcaactgttaaacttctagaccacccaaaaggccagatcatgccatgagcaccaaagggagctgaactactgtgttcaggacatcttctgcccagggtaagaagtgctgctgctacttaggaatccatctgatcagcattcttgttcagcttcacttcttcagggagaaggttctcagaaagggaggtgggttcagccttggagagttcagcgcaaatcccactttcaggcccgggggtagtagaagcctcagagccctctagaagagagaggctgggtatgagcctctttcgtgtgtgcagctttacaaaactttcaagattgcgagcatggagattgcaactggaaatgaaatgtttgcttaccagaaattcttgatccataaagtagggcttttctgacgatccatcatttgtttccagatcaacagcaaaacacaggaaaagtgcatccagcacagtttcaaacacagataaaaaactatgggctactaagtaggcaaaaaaagctaccaataacagagggactgcccacacctggaatgcccgattgtagttaaaagccatgagtcctccaaaaacagtgaaacacaccactaacacctgtgcaaaagaagagtttgttgaaaatctttatgaatcagttgcttagatgtttttgtcagttacaagtaatggtttaatatacgttcctgtgtgcaacgtgtgtgtgcactattgtaaagaatgcttgtcagaaattttggcagaatgaaatagaggaaaaaatgaaaagctgtatcaaaaggaaacccagttaatggcgagtaggaaggttatatgtaattttatctgtgcctagcttttgtatttatataaatgtaataatatctcacaagctttttattctgctttttcacttaacaccaaaataagcctattcactttaaaactttttttagaaaccatccctctttcttttgagacagagtctcgttctgttgcccaggctggagtacagtggtgtgatctcggctcactgcaacctccgcctcccaggttcaagtgattctcctgcctcagcctcctgagtagctgggattacaggcacccgccaccacacccggctaatttttgtatttttagtagagacggggttttcccatgttggccaggctgatctcaaactcctgacctcaagtgatctgcctgcctcggtatcccaaaatactgggattacacatgtgagccactgtgcccagtccaggtttcaatactctttccatatattcttaatgagaaacccacaaacgttcattttctgagattagtagcattttcattttagacctgaaaaagagggaatcagaatggtagaactgatcacaggtaagagagtaagactaagattaaaattctggctctacctattgtagtaccctggaaaggttattaaaccttcattttctcttctgcaaagtagggatacctcatgggattgaggattaaatgagataatgaagcacagcacccactatagagtaagtactcaagaaatatagttccctttcaaaccaattgttgtatggcttaattttcagaatcccaggctcctttatttagtcaagatatctcacctttcctagaaaaattatgaagtctccaaagcagttaatagatgtaaagtgacttgagttcttggacaagattttgaatgcatcttttgctgatgtacagaaatctgtcccattaatagcagttgtagtatatgc

SEQ ID NO: 1623 - DNA, 240 bp, Homo sapiens
tcacatgtttgggtgtcaggttcaattctagatactaagaatctgaatgaactagatgcttttcctgcctgtaagaagtctaataggatagagactacataaacagaatttaaatattgtacagtaattagtactgaggaaagtgtgtgtgtgtgtgtttagtatatagtgtgtatttggctgaatagaaggcaaataccagaactttccagtcaacaaaactattggaatgttatgtat

SEQ ID NO: 1624 - DNA, 1115 bp, Homo sapiens
tccttatcttaaaaaggtttatttattagttgtgcacttacaaacttacctcagttcttacatagtgtactttgtaagttgatgcatataaacatggttttagaagagtttttctgtcctaatttgtacaaaaaaaggtaaactaatatagttccagtattgttacctggtcaaacaataatgacaaagacaatgaggaagaatagggtttattaggtcttttaaaaaaaaattcactaacttttctctagtggtctcatcttctattctgtaaatggctcttagaaggaaatgttttccaggtacagatacctaaatgggtatctatctcacaatggcctggagttctgttccctcctcattccttaatgagtgcttgtcctgctgtgcccttgcattgtttaatttgttgctcctttttacgaaactctgaaaaacaaaagaacaagttagaatagtattatgtgtctgtactgttgataacgtaggggccgagggaaaacttctcctttgccctctgacggtttgctgaagaattaacttacaaaaggcagattaacaggagaaatggcatataaagtagcacaggggagaatcacagtgagtgtctaaatggggtacagataattctgtttttgggaaagggagatggggaagtgtggatgattttatgggggtggtgaattacttttaggggagtttaatgagcttgaagaacacttagtggctgggaacaaagtctgttgggcccacaggacagtggtttgtgacaaaagtctgtccaggtgtgttgactgaatttagtctttgtttctgctatataagtccagttaatggaaaactcagggaaggggccagaggtggtttttttctttggtgggtctggactttaggcagataaggggatttcattcagatgacagcttcatcctgtgctttgggagaaggtcagagagttcttgaggcttcttcagttcagcatgtcaaagtgccatattatggagtatcaatttctgagtcccaatgatagccatttacaagttcttggccttaaatttcagataactggatccttaagaaagtttcttctgttgaaaaaactattttaaggggta

SEQ ID NO: 1625 - DNA, 1115 bp, Homo sapiens; identical to SEQ ID NO: 1624

SEQ ID NO: 1626 - DNA, 21982 bp, Homo sapiens
gagaccatggcgagcccagggaaagacaattatcgaatgaagagctataagaacaatgctctaaaccctgaagaaatgagacgaagaagagaggaagagggcattcagctccggaagcagaagcgagagcaacaagtgagttaatgggagtattctcaaacatactattctgggaaacaagcccctatggttggcctccaccatgcaccctgacttgccctgtagaaaagtagcttactaggtgggcatggtggctcatgtctgtaatcccagcactttgggaggccaaggcaggcagatcacctgaggtcaggagttcaagaccagcctggccaacatggtgaaacttcattttctctactaaaaatacagaaattagccggacgtggtggcatgcgcctgcaatctcagctacttgggaggctgaagcaggagaattgcttgaacctgggaggcggaggttgcaggagctgagttcgtgccattgcactccagcctgggcaacaagagtgaaactccatctcaaaaaaaaaaaaaaaaaaaaaaagaaaagtagcttacttactgagtgagctactcatccagtttcctttgttgtaaataaatgttgggagctttgagaaagagaaaactgaccttatccccttttcacaagttagaccaacttagacatcatttatgtctttactgtaacattctagttctagttccttgttaccttttcttttcttttttttttctttttttttttttgagacggagtctgattctgtcacccaggctggagtgcaatggcacgatctctgctcactgcaacctctgcctcctgggttcaagcaattctcctgccttagcctcccgagtagctaggattacgggcatgtaccaccacgtccaattaactttgtatatttttggtagagactgggtttcaccatgttggccagactggtctcgaactcctgaccttgtgatctgcccagatctgcccgcctcagcctcccatagtgctgggattacaggcgtaagccaccacgcccagcctgagactataataatgcctcaccatctgcactcctacgccaccccgccaacagattcagtcacctgattattattatttatttatttatttatttatttatttatttatttattgagacaaggtctcactctgtcacccaggctggagtgcagtgagtgcagtgagtgacatgatctcagctcactgcagcctcaagctcccgggctcaagtgatccttcttcctcagcctcctgcatagctggactataggcatgtaccaccacgcccggctaatttttgtggattttttttttttttttttttttgtacagacagggttttgccatgttgcccaggctggtcttgaactcctgagctgaagtgatccacctgccctggcctcccagagtgctgggattgcaggcatgcgccactgtgcctggccaacctaacctgattttgcccacccttttgctatactatcattcctttttttcttttttttttttaagacaggatcttgccctgttgcccaggttggagtacagtggcgtgatcttggcccactgctgcctctgcctccaagtccttgaatatcttttccatgttagtaatcaatagtctcctcttctctttgtggaatacattccaggacccacagtggatgcctgaaactgcagatattactgaaccttacatatactatgttttttttcatgttttcatctttttacttaaaggaagcactttacagcttctctttggcacatttgaattgccagcatcactactcttgcactttgtggctattactaagtaaaataagggttacttgaacacaagcaattgccacctgataaccaagttggttattaagtgactaactggcagcagcgtatacagcatggaatggatgcactggacaaaggatgttcacatcctgggccagacagaacaagatagcgtgaaacttcaacactactcagaatggcatgcaatttaaaacttatgaattgttcatttctggaattttctgtgtaatattttcagaccacggttgactggataactaaaataatagaaagcaaaactgaataaggggagactaatgtataaagcttggcctcacttctcagctactctagtatatccttgtcagttatgccataatttaacattggattgttctttgttttctttggttcagagagtactcttaaccactgtctctttactttcagctttttaaacggagaaatgtggagctgattaatgaagaagctgccatgttcgatagtcttctcatggactcttatgtgagctctaccactggggtaaggcccctgcatgtgcctcaggctgacctggaaaacacctgcttctaaggacagaaattgggccgttcacatcatctaccagctttgccagtaaccatgacaagttctttcctctgtggaccctttcgtcagctttaggagtcaacaaagattcaactttgttagatatatctgaggaaacatttaagagaagccatcagttgcctcagaattaggaatcacttttcaaatgtcccaacttgaagcacctatagattaaacagaccccttctcctgagcctattatgccatcctcttgccctcagttttttagaaaacaggatgccaagcagtattatgtgctcacatctggctctaatgttggtttgcaaagtcctaaacttgttttatgttctaggagagtgtgatcacaagagagatggtggagatgctcttttctgatgattctgacctgcagttagcaaccacacagaaattccggaaactgctctccaaaggtacaaagcctggcccttgtcagagaggccttatatgatttagcctcttttctcttcactgatgtcatcaacttacacgtgccctcactcattctgctctagccctactgaccttggtgttgcttgtacaagatagacacattgctaccttcacactggatacttcctctgcctgatgtcctctattcccagatatctttgtagcaactcccttactcctatgattaaatcccaccttcaacagttttatctttttaccttgccctacatattctcctcctctccccccattatatttatcttctaacataataaaatgactcttcccactaggatataaactctctgagggcagagacttttgtttttgttccctcctgtgtcctctgtacctagaactgtgtggcacaccataggtacttaataaaaaaatttaatgtatgattggaaaaatacctcttgtttcagtatatcaaatagtcttcccaagaagagagtactggtctttcttgaaagggaaatgtgcagaccatggttgttcatcccttaggtggttctctctcccacacctttctttgcttacatttagtaagccaaagatgaacattcttaaattaggattggctttactctttaacattccagctgtattatacagttcaaagacgagtagatattgttaaaaccaccttaccagaagggagtttgggaatgtttgtaagggtggtcagaagtgtctaagaaggattgcaagctgacccccatgaagggatcagcaaaagcttctcctgtgtttttattttcccttctcccttatccagagcctagtcctccaatagatgaagttatcaacactccaagagtggtggatcggttcgtggagtttctgaagaggaatgagaattgtacattacaggtgaggcctgaagggaaggggtttgttttgtcttttaatttttgggggatacatagtaggtatatatatttatgggatacatgagatgttttgacacaggcatgcaatttgaaataagcaaatcatggagaatggggtatccatttcctcaagcatttatcctttaagttacaaacaatccaattatacactttaagttattttaaattgtgtagttattattgactatagtcaccctattgtgttaccaaatagtaggtcttattaattctttctgggtttttttgtacccattacttatccccatcccacccccagtcccccactactgggaaggggttattagatgaaagccctacttccaagaaattgcagtgggatacttctattgacatatctctcaggaagttcaaaagtaatgttaggaaacattcaggagaaaccatcagttccctcacagccagaatctcttccttaaaacaatttcaaaggaaaggcaccagactatgatagactgatcattcagttataaatcagaggctatagtccactacctgtgtgacctgaggcaaattgtttagcctctctgggtctcttgtttcagagatgggtgatgggtcaatccattggaacttgccagaactcagctgaaagggactttgagagacccatttcattctaatcctcatttcagaaatgaagaaagtgaagctcaggaaataaaagagtgacctggcaaaggatgcatgggtgttgtggtagtgcaggactaaacctgggaccctggaagcccaatgtcttattctcatctatatcacatcactgcatcttcccactctctaaagacgggaggggaaaggcttgtattttatgtgtgtgtgttttaaattcgtgggcaagaggcttgcttgtgttttgtgaggttttgttttggttttttaaattcatgggcaggaggcttactgttctgagccagctgataggcatggctgctcagtctgaaatgacctttcaatcattgcttaatctcactttcagtttgaagctgcctgggctctaacgaatattgcctctggaacctctcagcagaccaaaattgtcattgaagcaggggctgtccccatttttatagagctgcttaattcagactttgaggatgttcaggaacaggtaatgcttagatttggtgtgattctttatagtacctgtggtataataaaaaatatatttggtctttgtcctggttcttggcacagtgttaaaactcttggaatttcctgagtgataggggtgtcaagtacagatggcccctgggacttgcaactggtatctcaagttggggcagtcttgtgggactaacctgcggactctgcattaactctaggtgttagagtcagaattgaattaaatcgttggacacatggttggtatcagagaatgggtggttgatgtggaaaaaactctatacatttgttgttggaagtgccattggaaaaaagacaccacagtacccatatctgagtacccacaaatcatggagataaagatacaacttccatttctcccattgaattcttactagttggatagaattggagagtggtagtgggctcttttatagacttggtccaaggcagctacaagagtgcaactttcgccaggcgcggtggctcacgcctataatcccagcactttgggaggccgaggtgggcagatcacgaggtcaggagttcaagaccagcctgaccaacatggtgaaactccatctctactaaaaatactaaaaagttagctgggcatggtggagcttacctgtaatcccagctattcaggaggcttgagacaggagaatcacttgaacccgggaggtggaggttacagtgagcagagattgtgccactgcactccagcctgggtgacagagcgagactccgtctcaaaaaaaaaaaaaaaaaaaaatgcaactttctgattactttctccttttctgggcgatattgttttggcttctgtggctatagtacagatggcagcctgtctttccctgctgaaccaggaactcccagggataggtcattgtagaacaagtgctcagtaagaatttcaatagggaggttacctgagcttgtgtagtatatttggggccttgacatcattctcatcctggtgggtactcactttgcagttgtggctataaagtactcacaggagtaccaagctttgtgggtgacagtttcattatccccttttcaggcagtctgggcactgggaaacatagctggagatagctctgtttgccgagattacgtcttgaactgttccatccttaatcctttgttaacgtgagtaattataatcatctgtacctgggcgtctactgggtggccacgtggcaggtcatttgggggcagcatacttgattccttaagatgataggtaagtgcaaaaactataaaaatgcattctgattgccaaagtaaaagataggtatctttggagattgagaaggttgtggccgggcatggtggcttatgcctgtaatcccagcactttggtaggccagagcaggtggatcccttgagcctagagttcaaaaccagcctgggcaacatggtgaaaccccaactctacaaaaaatacaaaagttagccaggtgtggtggcaggcacctgtagactcagctacttgggaggctgaggcagggaggatcacctgagcccagggagatcaaggctacagtgagctgtgattgatcacaccactgcacttcagcctgggcaaaagagtgaaaaaaaaaaaagattgtgccacccatctgccaaaaaggatcttgttcctcacttcatggcactgcagaacctcatgttagtcatatcctcatatcctcctcattgttgagccaggggagagaggcaggactagcccacctggaaaaatccaaccttctctacaaaatgcattgatttgttatggggttttgcatacatacatcggacagctctgtcgtaaattatagatcaaagaccccgtgaagcgtcattgtatccttctcccatccttccctccgtacccttagagtaaactatgcctaaaccaaaacagatgaatgaactgttcttcagagaccacagtctcatagcctaccactgtcactttcttggacccttcacagaaaattattccatactgtgtggctaaagctctcacagtagacctatagcttttatttcttagacttttagcttttatttccagagaacaccattccttgtcctggacttgtggccagggttatgggcatgatatatcccactttagaagctttacaggcttactccagatctagccctctgtttcgtccctattatctatggtattaactagccacagctggtcctgaaatgaatactctgtatagagcctggcctcctaacctataccagctctattaacttaggtctgtgagtaggaagaaacaggctgctagagtctgagaggtctcattggatttgtctctgggttcattggcaacagtcctatgccaaggcctcagtgctcaggatctggctttgctgtttccttcagactccttaccaagtccacacgactgacgatgacacggaatgcagtctgggccctgtcaaatctctgccgagggaaaaacccacccccagagtttgcaaaggtgagagagctacttactagaccctgagtgacatcaggttccttcatatggagtttttaagtctttgggatactccttggagtctcaaatcatgggaaactgaaagaagcaattgttagtgaagtagatgatcttgtgtacctggatagtaaagtgaaaaggtagacccaaatgtttaatgtagtagcgatccctagggtctggaattacttgtgtgtgtgtattgtgggggcggtggttgcaatgttagggttcgtgatagagctgatatagtcttgttcccctgtgagtctttctcactctgcttcccacaggtctctccttgtttgcctgtactgtctcgcctactcttcagcagcgactcggacttgctggcagatgcttgctgggccctttcttatctgtctgatggccccaatgagaagatccaggcagtcatagactccggagtctgccggagattggtagagctgctgatgtgagtggtcttagaaggggtacaggttctggctgggcacggtggcttatgcttataatcccagcactttgggatgccaaggtgggcggatcacaaggtcaggagttcgagaccagcctgaccaacatggtgaaaccccgtctctactaaaaatacaaaaattagctgggcgcagtggcaggcgcctgtaatcccagctacttgggaggctgaggcaggagaatcatttgaacctgggaggcagaggttgcagtgagccgagatcgtgccattgcactccagcctgggtgacagagcaagactccgtctcaaaggaaaaaaaagaatcccagcactttgggaggctgaggcgggtggatcacaaggtcaggagatcaagaccatcctggctaacacggtgaaaccccgtctctactaaaaatacaaaaaattagccgggcgtggtggcgggcacctgtagtcccagctactcgggaggctgaggcaggagaatggcgtgaacccgggaggcagagcttgcagtgagccgagatcgcgccactgcactctagcctgggcgacagagcgagactctgtctcaaaaaaaaaagaaaaaagaaaaaaaaagggtacaggttccttaagcttctccaggctcagactaaagagagagaatcagcagggccgaaaatggtgtgctggccttctgatcagatctccctcctctgtaggcacaatgattacaaagtggcttctcctgccctgagagccgtgggtaacatcgtcactggggatgacatccagacccaggtaagaaagaggagggtgcaggatcttagaccagctatggaagagcttgtggagagctgccagtggacaaaagcctttcctgcaaagggctgtggtcctgatgggaggcactatggtctaaggaagtaagtgtgggcttgagtgaaaagttccagctctgttattctctaaacagtcatgggaaacttggttccttcttttcttacataaattgggaacaaatcatcgtctaatgggtgaaggaaaactaagtggaataactggacttaccacctgggacattgtgagttagttaagtttgagtcatggtccctttgagatactgaaagctatggaactccacccctgcttcctagatctttaaggtctcatggatatcatggaccttggaataatcttttgtaaataacccttctggtgaaggcatagtaaacaaagttcccctgctcaaaggctagagatttgggtattctttgggttttgagtagcgagcataattctgtgggattctggacaggtttcttaacaggtgagtagtgtcactcaaacactcaaacccacatgctcattttctgggttactttgtatatgtatatgcatgtactttaaaatacaacataaaatttaccattttaaccattggcataaagtacattcacattgtttttccgttattgccactagccagctacagaaattttttatcatctcaaactgaaaccgtacacattaaacagtaactccccattctcccttcccctagtgcctagtaaccaccattctattttctgtatctgtgagtttgagtgctctaagtacctcatgtaagtggaatcatacagtgtttattctttctcgtctggtttatttcacttagcctagtatctttaaaattcgttcatgttgtagcatgcatcagaactcctttgaaaggctgaatgatattccactgtatgtatataccatattttatttatccatcaatagacatttgggttgtttccaccttttggctattgtgaataatgctgctatgaacattggtgtacaaatatttgttcaagtccccggtatatacccagagtggaattgctggatcatgttctaattttatgcctaatttttttgaggggacaccatactgttctgcacagctgctatgccatcttacattcccaccaacaatgcagcatgttccagtttccccacagccttgccaacagttgttattttccgttttttgttttttgttttttttttgataatacccaccctaatgggtgtgaagtgatatttcattgtggttttgatttgcatttttctaatgattggtaatgttgagcatcttttcatatgcttattggccatctgtgtattttttttttttttttggacacatgtctattcaagtcttttgctcatgttttaattgggttgttgagttttctggttgttcaattttaggagttcttcatatgttctggatattaatctcttatcagacacatgttttgcaaatattttctcttgttctgtggttttatcttttaactttggtgtctttaaaaaaaaaacttttaacttatttaattttttaaaattgagacagagtctgtctttgtcacccaggctagagtgcaatgatgccatctcggctcactgcaacctctgcctcctgagctcaaagcagtccttccacctcagcctcccaagtagctgggactacaggcatgcaccatcatgcctagctaattttttgaatttgtttttttttggagagacagggttttaccatgttgcccaggctactcttgaactactgggcttaagcaatcctcccaccttggcttctcaaagtgctgggattacaggcatgaagccacctcacccagaccaactttcttttcttttttaattttttttagagggtctcactatgttgccccagctggccttgaactcctgtgctgaggtgatcctactgcctcagcctcctgagtagctgggactgcaggtgcataccactgtgcccagcttactccaatgtcttgatgcacaacagtttttcattttgattaagtccagtttacctgggccaggtgcagtggctcatgcctgtaattccagcactttgggaggctgaggcaggaggatcacttgagcccagaagtttgagaccagccctgcaacatgggaagaccctgtctctacaaaaaaaaaaaatgttttttaattagcagagtgcggtggcaccctgctactcaggagtccccagctactcaggaggctgaagtagaaggattgcttgagactgggaggtcaaggctgcagtaagccatgatcatgccactgcactccagcctaggcaacaaagtgagaccctatttaaagaaaaaaaatgaagccgggcacagtggctcacacctgtaatcccaacactttgggaggccgaggcaggcagatcacctgaggtcaggagcatgagaccagcctggccaacatgatgaaaccccatctctactaaaaatagaaaaattttccgggcgtggtggtaggcgtctgtaatccaagcgtcttgggaggctgaggctggagaatcacttgaacctgggaggcggaggttgcagtgagccgagattgtgccattgcactccagcctgggcgtcagagcgagactctgtctcaaaaaaaaaaacaaaaacaacaacaacaacaacaacaacaaaaaaacataaaaaaaattaaaaacagtttaatttttcttttgtttcctgtgcttttggtgttctaggtcattcttaactgttcagccctaccttgccttctccacttgttgagcagtcccaaggagtcaatccggaaggaagcttgctggactatttcaaatattactgctggcaacagggctcaaatacaggtaaaacaggcagggaagtcaaggggcatgggaagtcataggaacttgggaggttgttggaatatttgctttcagaagaaagaatttgtttccctttaaaaataggagtcaattggccaggcacggtggctcacgcctgtagtcccagcactttgggaggccgaggtgggcagatcatgaggtcaggagtttgagaccatcctggccaacatggtgaaaccccatctgtactaaaaatacaaaaattagatgggtgtggtggcggacgcctgtaatctcagctattcgggaggctgaggcaggagaattgcttgaacccgagaggcaaaggttgcagtgagctgagatcacgccactgcactccagcctgggcaacagagcgagactccgtctcaaaaaaaaaaaaaaaaaaagaggggctgggcatggtggctcatgcttgtaatcccagcactttgggaggctgaggtgggcggatcacaaggtcaggagatcaagaccatcctggctaacgtggtgaaaccatgtctcttctaaaaatacaaaaaaaaagaaaaattagccgggcgtggtggcaggcgcctgtagtcacagctagtcgggaggctgaggcaggagaatggcgtgaacctggtaggtggagcttgcagtgagccgagatcgcgccactgcactccagcctgggtgacagagcaagactgtctcagaaaataaataaataaataaattaattggagtcagtgtgtactattggtcaaagaagctgtgtaaccaaaactgggttcttctgtagtagcctgtcacctatataggaagaacaaaagaaaactcccagaatggggaagatgtctaagtctcagctgatttggggactagatttatttatcatgctgaaatgactttctccttccatctgcctcctctcaattctctctcaggctgttatagatgcaaatatcttccctgtgttgatcgaaatccttcagaaagcagagtttcgtacaaggaaagaggcagcctgggccatcaccaatgccacatcaggaggaacccctgagcagatcaggtattacattcctttcccgttgtcttgaatgataatggatgctctccctgtttgctcatggtttacaggtgacctataaactgctcttgctcagacaggtctgccccctagtctcactgtaatagaattttactggtaaactgctacagtgtcactagaatctggaatagattccatgtaagccatgtgggaatctattccagattccagtgacactataacagtttaccagttttcccttctggagaagagaaacatgacatggacatccatcctttctctaccttttcttatccaacagagaactgaaatctatgtagttctcaattcaaatgaaggggaaccgtactatgggttactcaaaacagtttcttcagcctgaccaacataagaagactctgtctctacgaaagacaaaaattagccgggcgtggtggcatgtgcctatagtcccagctgagatgggaggatggcttgagcctggaaggtcaaggctgcagtgagctgtgattgtaccactgcactccagcctgagtgacagagccagagtctgtcacaaaaaaaaaaaaaaacaaaaaaaaacaagcaagctggtgtagtggctcatgtctgttatcccagcaccttgggaagctgaagcaggaggatcctttaaacccaggagttcaagactagcctgggcaacatagggactttgtctcatgtgtacaaaaatgtaaaaattagcaggttgtagtggcgtgtgcccgtggccacagctactcagtaggctgaagcaggaggatcacctgagcccaggaggtcacagttgtaataagctgtgattgtgccactacactccagcatttgctacagagcaaggtcctgtctcaaacaaaaaagcagcttctttgagaaattaatttgggatatgagacttgaaagaagcgaatagaaagctattttgtgtatgtgtgctctttttgagaccgcaacctctgcctcccaggttcaagcgattcttctgctttagcctcctgagtagctggggttacaggcacgtgccaccacgcccggctaattttttgtacttttagtagaaacggggtttcaccatgttagcaggctggtcttgaactcctgatgtcagatgatcctcccaccttggcctcccagagtgctgggattataggcatgagccacctggcctgtgtactcttttattttagtttacattatctgaacattagtggaaagtggtgggaatagttaagtgttttgcccttcacttgttgcctattaaggggagcacagttagtatatataaagtcttaggagaaaagagatagctgttgagttaagctttgaaggataaatatgggattgtaaaaggcctcttagacagggaaaagcataaataaaggtacaggaatcagaaacctggagacctttacaagtgtgactagaatgtattgtccttggaagggaataatgggaggcagagctagaaaggaactaggagccagattgcagagcatccaggctgggctgggcttgtggtattatggtattgttgtgccatagaatttggagttcagcgaattagggagcctgtgaaaaattttatgcagggaagtaatgtgttcagaggggtaatattgcagccaaggagacattagaggcaaggaggaggagtgtttggtagcatccacatgtgaaatgaactagaccaaccacatgtgaaatgaactagaacaatatcaacaggaaggtagagagatagagaaaggataagcggttatcaaggctcagtaagagcagtggctcacacctgtaatcccagcactttggggaggtcaaggtgggaggatcgcttgagaccaggaatttgagaccagcctggacaacataatgagactttgtctctacaaaaaataaaaaataaattagctgagaatggtggcacacacctgtagtcccagctgtttgggaggctgaggcaggaggatcacttgagcccaggaggctgcagtgagctgggatcgcaccagtgcaccccagcctgggtgacagagcaagaccctgtctcaaaaaaaaaaaaaggacttggttggggaacactctcattctctggcatggaatggggtgttgcacaattcttttttcttttcttttctttttttttttttgagacggagtctcactctgtcgcccaggctggagtgcagtggcgtaatctcggctcactgcaagctctgcctcctaggttcacaccattctcctgcctcagcctcccgagtagctgggactacaggtgcccgccaccacacctggccaattttttttttttttttgtatttttttttagtagagacggggtttcaccatgttagccaggatggtcgcgatctcttgacattgtgatccgcccacctcagcctcccaaagtgctgggatcacaggtgtgaaccaccgcgctcggcctcacaattcttaaaaataaaaaaataaattagtaagagtgggttgctgagagttcagagcacctgcccagcacttcatgtgtcctgtactagtttagcacttgcctggtctctggcccctaggtacctggtctcactgggctgcatcaaacccctatgtgacttgctgactgtaatggattcgaagattgtgcaagtggccctcaatggactggagaacatcctgcggcttggagagcaagagggcaagcgcagtggctcaggggtcaatccttattgtggcctcatagaggaagcctatggtatgtgccctctcctcaatctaggtcagaacctgagactgtaggcctccaacgtggtatacatatgttggtggtggcggagtgtgggttgggaagcatccatagcttccatgagactgatgtctgtgtcttcagaacagttaagagctcctgccctagccaagtttcaccatccacagggtttcacacgttaccatgagtataatcaggatgtgctgagtagctggggtacagctaggatttggatttggctcatcttttgagttgagagttgtctctcaccagtttcttctccttctaaggagtgataggtcagttctctttctgataggctgtacctataagagtgctggattaactcatcactcatccctgagaggctgatgatgtgcccaggtcatgcttctagtttaaagcagaatcaggactagaacctctgtaactgacattttggtctctttcctttgggattctgtagttttgagaagaaatcttaactctcccctttcaggtccaagagtgatctgatcatatgacttgtgtttgtaagcactaacatacctcagggaaggaaaaataggtaaatgtttcacctgcccatagaaaagcactcacacttccctctccttccttcttactactgtaggcttggataaaattgagtttctccagagccacgagaaccaggagatctaccagaaggccttcgacctcattgagcactactttggtgtagaagacgatgatagcagcctggctccccaagtcgatgaaacgcaacagcagttcatcttccagcagcctgaggcccccatggagggcttccagctataatatctgcctccagggaggggaggggatgggaagcaccaccagccagcggaagagcagccctctggtgggcgggaaaccagtgtccccaccatcagccaccacacacctctgctgccctggagactgtgctcttgacctgctccgcccccttccctggagggagcaccctctggacagacagaaccatctgaggctcacctttgggttttgtgacaagaaggggacgtgttgggtttttcttccttacactatattttggctgcacacatgtctttaacccaggagcccaggggtagacaaaggaggactaaggtaatcaatttgcacctttttttatttttattttttttctttttttcttcagtggtgacttccttccctttatcttttttcattcttcccggtcctctgccctgatctgtgtaactcttatcttgggtacttgagcagacggtatattccagaggtgggaggtgggaggggaagggagaaatccaaaacaaagtgttcttgctctgacagaatattaatcttgtacgcttggattgagttatttaatttttttttcttttgcacatttttcttgtattaagattgctcttcccaagagccacaagttcctggttttagtaaacccagctgcctgcattgcctgggactagaggctggggaggctaccatgaaacaaaggtccctccctccctctgactctttgcccagacctctttagtttgggggatcctcctcactctcctgaagtgtctcaagtataccagtgggagtgcaggggaggagcacaggccttcagatggggcttcccacgtgtagctactgatcccatatttcctactcaccttccaaatggtgcgacccaacttcatttgtttacttgaaaattccccctcgaggttgagagaacctctgaggtggctgtattttctcctaagcttgagatagggggctgtggtccttcctttctcctgaggagaaagtccttgctctggtgacctgtaagttgcagaggagggtggagtgagagtgtcatgtattgggatagtcagggatccctgcctttggcctttcttcttcttcttcttcctcttccatagttggatcatgtatattttacttctaaaggagagaatgtcaaaaagttctgtatttttttatattctatatattaggtaggtcaatcttaattggtctcaagaggaagaactgtctgtcatttcggtaagtaggatactgtgaggaagaccaaaaagagatatggatgcttcctcgctcaggaggcctgagcttggtccttttcctctctgcttggattctggaccaccacctgggaccaaccttcagctctggaaccttcataaagcaggtcagcgtggcctgattgtcccaggacctgaagggagcaaggatggcctcagggcctggtgaagtctgctactctgtccttactgctgaacatcctgcttgtatcaggaaactcagaagcagtttgccttgtcaaattcaatctcaatggccattgtccacataactgatcacccatggctgcctctcctattatctattatcactgaaacttagtagcctgctttttttttttttttttttagagctattgcgtatcttccctgtttgggatccttgtacctggtttgggttttcccttccttgtgacaattataatccagatgcctcttctttctgtttgaattacggtagtgcattgccttagtggcttgcctgtgcctctgggtggattacatatgatagtaaagcccacctgtttggatgggagtagaggaagttggtgtagaccagctgtggagctgaaggcacagtctgccccacccccacctccccactgtggttagtcagaggcatcctgctccaagctctgcttttccttcctctgaaacaatgccattcttgcttctattgctacacatctccttctggctcaggtgaaatccatgcccttctgcttatagacctaaagttcaggtacttattattggccattgatcttgaatttgccctctcctagtgctgcagtcccacttcaaagccattttctgaggaggatggtttaggtctggcaattgtccttgaaaaatcccacccatgttgtaccaccttggtgagtcatatgccactcatcagcttgggaatgatggctgccaactcccaatctcccaggaaggcagggggcagaatctttttttcacttggcctgctacctccattaaaaaaccattctcttacagtttaaaaaaaaaaaaaaaaaaaaagccttcccctacccaacctccgcccattgttctcttccaaagggcaatttagtaggatctactttgtacatctcaagtaagagttaagtccctgatacagggaccagtttcttagtgtaagacatacacatcctgcttgtccagctgttcctccaaaatctactttggcttcagctccgggtcctgtaccagatggaaaatgtttttggtgatctggctgctgcttaaagccagttttccctaagaactccaaaggctaaagtctactaggggcagagtgtgaggatagatttctaatcagagaaaagtggcctccaggagctttcatttatgtcttctccagaccaggttttcctgttatcttcctttaatcccctttcaaccaacaggtgaagttcttccagcccacagaggtagtaatatcatcttttctatctcctcctctcctttggccatgtaatgaagcaaaatattatttatttagcccaggcttgagagccactgtttgtggacagtcttcatctagattccataccctggcctaggcgaggtaaggctctctggttattgccaggatggagcccctctaccccagtctgctgtagggaataccctaattagttgaggcatgcttttggaatcctggcatgttggcatatggctggtctatcctttttaagatctctggttgggggtatctggatatggattaggagggacaaggagcctttttcttggctaatgttttccaatacttttttgaatggtgccagcccctccaggcatcccacccccaaatcatcatctttagtactaacagggtgtctggtcttagaagcctcccttcagatcccagctgaccctggtgactgcctggccttgatgttggctgcagccttctgatagaaccacatggattccacccacagctggccaggcttgttacatgggtcagggaatacaaatggcccccccccagggagcaggtgttggcctcagttttcagggacccttggtgttgctccttacctagagcccattaatctaccccatcaactctctgccatgaaagccatcttccaggagccctgttttttggagctgaactgcacagattatagctgctattgtacttaaataagggagaggaaaagaaggttctcaggcacagactttctatttttctcaagccaaaccagtttaaaatgtctagcagaatgaactgtatttccatttcttcatgtctacctgccttccccccacaccctaaagttgtacttgtttctagcaaactagaaggaaaagataggaaagcctggcactactaacctcacctctcatacacctctttgaaggccccagctcttttgttcaggcctctcttctcccctagactcactcagcttggtatccatcatcttgagcattcttcagtagattcatctagggttcagattccagactctcagctgaagacagggagccaatttcccccaggtccctgcaggtaatccagggaccccatagggagaacaggctgactggggcattaggaatgtttgtacctctctgcttccctggcagcctggggaagggtgcagggctcagtgcgctaaaccatggtaaacatcttcaatagaactaccctagaatttagtgagtgtgagactgagatattgctcagaataaatttattccatagccatttaggattgcatgttctggaccaaccttgtccagtatgttttctgtttgagctttttcattcttttgttaagccaacaagttgagaatttggccctgctgggatccatgtagtgggcactagctgctctttggccaaggccttcataaatgattcagtctctcattatctgtcctctagccccacaccctgatttagaccgtggcaaaggaagaacttgaggtcaagaccaaccaaatctgtgaattaaagctgttatttttttctctgcaagggcgctttgcttcaggtctgggctatgtgcagaacctaagcaggctgtgagagttagaagaggcagtattacatgttaggcccagaacaccatgggaaaaggtttatgtagtgtatcttagtggcctgcctagctgcctctgggccaggctgacttctgatgtccacattagctcgtacctgaaccctgttgctgaatgccagccctgttctcctgtaactattatatacgccatggcctggggggcattgaaggaagtaagctctcagagatcctaacactggctgggaacctctgactcagagcatgtctttaaagagtccacatctggccaggcgcggtggcacatgcctgtaatcccagcactttgggaggccgaggcgggtggatcacgaggtcaggagtttgagaccagcctggcaacatagtgaaaccccatctctaataaaaatacaaaaaattagctgggcgtggtggcaggcgcctgtaatcccagctacttgggaggctgagacaggagaatcacttgaacccaggaggcggaggttgcagtgagccaagatcatgccactgcactccagcttgggtgacagtgcgagactccatctcaaaaaaaaaaaaaaaaaaaaaatccacatcttcagctgggcgcggtggctcatgcctgtaatcctagcactttgggaggctgaggcgggcagatcacttgaggttaggggttcaaaaccagcctgaccaacatagtaaaaccccgtccctacaaaaataaaaaaataaaaaaaataagccaggtgtggtggtgggcacctgtgatctcagctacgtgggaggctgaggcaggagaatctcttgaacctaggaggcagaggttgcagtgagccaagattgtgccagcctgggcgacagggtgaggctcttgtctcaaaaaaaaaagtccacatcttcatgaaccctcagactctggagttgggtgtcggcttttttagccagcttttgtgggaattgcctttgacctattaaagaaggaaagtgggtaatggagtcccagccactcaagagactggatatcccccgagaatggcttgggttaccagctatggacccttggaagatgaatctaatccttctcactggtttttctttgcaaattcatttgcttttatttttctaataacaataaactctattttccatgttctcagggcccctgggtagacagacacagcttgatttcagagcagacataggcgaagaaaacatggcattgagtgtgctgagtccagacaaatgttatttatatacacatccaaatttgaagagaaaatgtatttctttaggtttcaaacactgtaatagatataaagcaaaaataaaaacctgttgcaaagttctaaa

SEQ ID NO: 1627 - DNA, 98 bp, Homo sapiens
cctatagtcccagcactttgggaggccaaggcaggtggatcacctgaggtcaggagtttgagaccagcctggccaacatggtgagaccccgtctctac

SEQ ID NO: 1628 - DNA, 110 bp, Homo sapiens
ccgccaccacgcccagctaatttttgtatttttagtagagacggggtttcacgttggccaggctggtcttgaactcttgacctcaggtgatccgcctgcctccgcctccc

SEQ ID NO: 1629 - DNA, 2841 bp, Homo sapiens
tctagttcatttccactcatatctatttctgctaatagattgacagcaacctttggtttaatgctgtgttctctagctacaccaacaagttatatattcctttccaatattaaccaagtatttattttatgttagcctatgactgagttttatctatgcttgcacatatatagaatgtaaaaatataattctccatgtttaatgtatccatataaaaatgaaaatacccattttctgcattcttaaagggttaagaaaagtaacatgtaataagcacatggaggactttagaccatttcttgtgttagaggagactttatacatttgtgaggttttctgtcttttggtccttttatgttcttagtccatttcattattgttttaatatttctaccaaggaatgaccaagaaaagagaaaggaagaaaaaaaatgtgttaatcattttcttttaatggtatgtcagcagaaggggttctgactgtaagctaatgtgcacttgtgcctgtcctctttgtcttaaactaaagttggtggtatgaatcgaaaaatgtgtattggtttaaaaagcagtttatgatatgaaacagtcttccagtttttatatcaactcctttgctttcaacagtcagttcaaagcaccatttattgatggtttactgtatgccagacactgtattttttctttacgtattaccctacttaatcctcaacacaattttatgaagtagttattgttagcctgaaactggcatttctccatccttttatggtgctgtctttgaaaagtctcagatgtgtaacatgtcctagaagtagataattatcaaaggaagactgcaactgcaactcacttccctctgagaaaaaatatccctgactagattacatatctagttccagaccagaacctggtggtattaaaagtgttttggttgactattgtataccataatgagtacctacattcccaaattgcctgcctggttgttgtacagacttaaaaatctagcctgccttgatttttacttttcagatacacatgtttaaagagatctttgctggtcacagtagctcacacctgtattcccagaactttgggaggccaaggtgggaggattgcttgagcccaggagtttgttcaagatcagcctgggtctctacttaaaaaaaaaagaaaaatttagctgggtatgttggcacgtgcctgtagtcccagctactcaagaggctgaggcaggaggatcacataagcacagaagtttgaggctgcagtgaactatgatggagccattgcactccagcctgggcagtagaggagacttgtctctctctgtatatttgtctctctctccctctctctctctgtctctcataatacatatatacatacatatatatatacacacacacacacacacatacagagagatatataaaatagatataaaaataaagatattttaaagattatttataaatatatgttttttaaaaatgtagtctattataagccaaatgtcattaggcatgtagtccatttctttctgtgttcaggcaggagttccagttctataaacattggtttatctgtttttctagcaggtgcacacatgggttctcagtgatgtgtagccggggcatagattgctctcagtctgttgcaccctgcaggggagatgtctgaggtcctccctcgcctggctgtgctggacgcacagtgcatagcagaactaactgcacagcagaaatgcctgttctgcgttcccattgatacaccaacagctaatgaagtctcttttacttttaagaaacccttatttggctttggcatatttacatggtagaggcctagaattttataaataaaattttgaagaatagaaatgtattttttcacgatttaaaaaccacctgtatggtttactctggagttgacctgttccactcatccttctccccagttcatttgtttcgtttcaattccactttcccttatagctatcttcaaagcagtgtctatgggacagcattgccaagagccctgactgggcctggcttggtaactcactcctgtaatcccacctgcccctagaagtgcagatatactagaaaatacagctgtctttgttccagtgaatatgtataaggggtgacatgccttggtggaaagcagctcagattgtgtggactcctcaatccctgctctaccaagagctctccagttccaaaactgtacactcagtggctatgttctgtgtgcctgctcccaatacagccattatgttgttcatccagatttgagaatttaagcttttcactcctctttgggtagtattatttaagtaagaacttctaggaaaatagtatgagtttggttatttttccctcggcagcaggaattttctgaatatttagcacattcagattgctccaagaacagcattgagcaatgctgtacatgtgctttctcctaaggctgtctcccctgtctactgggttctggaaagactcattgtccttcagggaagggagcatttttcctcactgccattgctgagccttttctcctgttgtatactatttagcccagcatgaagccatcgccgactgtaaggagtgatggatagaagtgtttacttggtttgtgaggccttgtctctaaagggtaacagtctgacaaggaaaacatttcaaagagccctgaccaggcctggcttggtaactcactcctgtaatcccagtactttgggaggccgaggctggagaatcatttgagcccaggggttcgagaccagcctgggcaacacggtgaaaccccactctatttaaaaaaaaaaaa

SEQ ID NO: 1630 - DNA, 758 bp, Homo sapiens
aagttattctttattgtggctctaatttggcatatttttcagacacaggttgctcttgatacatcaaatttctgctgttaaaaacttcagttattttgagtttagttaattcaggagcgggaacctaggtaagtcatctgtagagcatctttgcaccttaagagaagtttctgattagcctcaattcagtttagtagaatattagtgtggatatctggtggcaaaacctattcttggtgcaatttggcttttcgtggcctcaggcatagagctgacttggtagtggaccctctgtccacacccacccggcccttgcgcctttctagcataaagtggtgtgtcagagccactgtctccacagaaagcaccacgtttgtttcatttgacttatttgaacccgtttctcctgcctttgcctttttaaataaaaatagcaaaaattgattcaagtgaatctattagaattttctaaaatggagcccatttgtcttttcagtcttgcaagtaaagtctttaaaacaattaagcctcccaatgatttaaccgtattttcttacccccccaccctgaataatatttacaaagaaataataacgtgaatttttaaaaaccccgtccttcagttgttataaatgatagttcattcttggtaagtatatctgtaacaaaatactggggaaggacatgaggtatggtgaacacttaaaattctgccagccagcttaaatacataatctaaatttaacccacgtaacacc

SEQ ID NO: 1631 - DNA, 625 bp, Homo sapiens
aagtcacatacaggtagaccttatgacatttccagttgaaactaggcttgctttcggtacacaggtgaagacttgaggaagccagtgccagagaggacgtgcctcacccctcagctggctgaatgcgcttcattggcttacgctttgctttctgtatgctttctgtccttctgggtggtgtcgcatatatttttaaaaccacattcagtgtgatgaacacttgttggtacacttctaaggttagtcatctttccttctctgagcagatccttgagaagggcattgacagtggatgctttaaatagtgttcagtttttaccagtaataatattttttggtggatgtcatgaaaacacatgacatcgtgttgtgcccatgataaaaagtcctgactttttattgaatgaggtgtgctggtcaaagagacagacgtggctgccttctctggtaacagccagaggaaaaagttagcaattctagatgggttctacagctttaaaaaacttgttgtatccttaggtcctcataatattaaatattttctaattttaacagattttaagagtcagatatatactttgacttgaatgatgtagtgttgcttaaggaagaaaaaattataaaa

SEQ ID NO: 1632 - DNA, 2144 bp, Homo sapiens
ggaatgggccactgattcatttcgtggttaactggaatactgctttttaattgatacccagctgtatctaaatcattacaatactggacagatagtgtagtgcagtgtatttgaaatgcagtgctttgtttggcaaagatttatttaatggtttcattttctctgcaagaagaaaaaaagcagatcatcgaagctcttattatttgcactgtggcagattcacttgagttcagaagcctagggaaaaggtgggacttttgaaactagggcagtaggtaaatgtggacacaccttcgtttgtatttgattagggatctgacagcgtgcatatgtgtacaggtttgcacgtgtgcatacacacatatacaaatcatagaaaaccataggtgttctgtgagagagaaaattttgctacttaaatacagcgtgaattctcatcctgatagttgcagaaaatatttcttttaaaatggagattaatgtctaattccatataaagaagattataggaaaggtgatttaaactgtaagtagctttgttcaccaaaacgctagatttatttgaaacagtgttttatttcttttggaaggcagacaactagtttaatagtgtacatatgaaacgctaatttggcttgttaattggatgcaattaaattgaggttattttatactgcttaattgttagaaaattacatgcgttgccatgcctgtgtaatgtgaagcaaaagcgaagggtatagcaggagtgggggtgggagggacgcaagatctagtcctgtctttgcaattaactttctgtgaaaacttggaaacaagtcatcgaagctctttggacctcatttggaaatggaagagattggaacagatggctcctaaagcttcttccagctcatattctatcagtttataaattctactttgtagttgtagagaatgcaatgtcattatattctgtaattatggtattacaaggatgaactaaacacttaaaaaaatcagcacagtgccaatttagcaaatccgttagaaggaaggcaatttaggcttaaagagcactcacctgtgccaggctccatcccaggctctctctccacattacgtcacttagccctcacaaccaacctgagaagatttagttttttatcttgatgtgtatacttaaagaaacttccattcggaaaggtttttgtggggatgctttgctagtcattggtgaagcaggattccaactcagggttctttggctccgaaaatgctttgtctttttaccatttcacgcagtataagcaattgtttacacatcaaaattatttcaaatatttaaaaaaggccaaccatatttatcacttagcacaatgtttccccttagtagtatatggataaacaggtagcccacgggattaagaacctcgatttgaagtcagacagaatagggcaaattccagctccaccaccacctgggggaatttgggtatgttacttaacctccctgaggttacaaaatgaggataatacccattcaagagtcattgggaaatttttatgagaatgtttgtacccatctcaatgagcacatagtaaacgtttaatacctggtagctatgggttattattaacaaggtattagactataagaaaaacataggacaattcaaattgttgtgacagtaaaatattaaatattttcaaatggtccattaaactcttgactgaaatggtttaagaaacaatgttagaatgacatggtttcacatttaacagttaacaaatggaaatatcaattaaaatctggggtgtttctcactgagctcagccagtgctatgccaatgaagtgaactaaattctctggttctttgtggaaaatcattctgaagtttttgctctaaaaatagcttttggggcctgaattaccccttaccccactcgaacttctgtgcaagagccagaggaccagtgattactcgtggggccttgggcctacttaagagactcaacttgggtgttcacaggactgttgactttaattctaaaaaaatttattaattcaacagagatttattaagcacctgctctgggaaagggctgttctagacactggagatccatcaatagacaaaaatagtaaaaaaaaaaaaaaaaa

SEQ ID NO: 1633 - DNA, 2144 bp, Homo sapiens; identical to SEQ ID NO: 1632

SEQ ID NO: 1634 - DNA, 517 bp, Homo sapiens
aactttattaaaacttacaattgggagtagagtataaatggaagcaggattttttccaactggaaagattagagggttcttatgagaggaggtgattcttttttttactgaggatcttgaatgttaagtagaatttcactgagtaaagaagggagtcaggagctcctcatactctgacctgggatgggaggggacagggatagtaccagggcagaggaagagttgggagcctggaaaggtacgtagctccagatcttgtggtgcctcaaagacctgcagagaaagctggacatcactgaaggtttttgagcagagaggtgatgctataaagtgtgtgtttcagaaagcttatgagggtatatgggatgaatatctcggtggcaaggagacagttagattgccaaaatatcctaaagagaagtaatgaaagttgcccctactgaatgataatatgaattcttttactctgttaattgatgtgtttaaaagtaccctaaaagtaagtaacaaaagtgat

SEQ ID NO: 1635 - DNA, 517 bp, Homo sapiens; identical to SEQ ID NO: 1634

SEQ ID NO: 1636 - DNA, 9760 bp, Homo sapiens
gtttattctgaccaaagcatttattttcattccatttacataggaggtggcattgtagaaaataaaaactttctcaaagagatatgaattaaagaaaagttagagtaaggtgaatacttatttaaacatacctttagagtgagggtaagcccccttcccaacccaaaatgaactgaatgagagagaaaaagaggtccagagtagtttgtggagcgatgtttccatctctaatgccactcagctcaggagcaggcttcagacactgcctttatctttacagaaagccatgggaagggaaatgtctgaggtagagctcagcgttgggcatcatatggctaatcactcagaggtcactaatcactctcccttttcttgtttttcagtgaacgagataattgggagagacatgtcccagatttctgtttcccaaggagcaggggtgagcaggcaggctcccctcccgagtcctgagtccctggatttaggaagatctgatgggctctaacagtgcttactgcagccttgtgtccaccaccaacttctcagcatgtttctctccttggaccttgggtttccaactctgcagccttcaggtctggggccaggagtgggacccaccatttgtggggaaagtagcattcctccacctcaggccttgggtagatttggcaaaagaacaggagcagcataggctgtttgagctttggggaaatgaactttgctttttatatttaactaggatacttttatatgatgggtgctttgagtgtgaatgcagcaggctctcttgtttccgaggtgctgcttttgcaggtgacctggttacttagctaggattggtgatttgtactgctttatggtcatttgaagggccctttagtttttatgataatttttaaaataggaacttttgataagaccttctagaagcaaaaaaaaaaaaaaaaaaaaaaaaaagaaaaaaaaagaaaagaaaaaaagaaaaagaaaaaaatatcccaagcccacacctatgcctcagaaagtcagcatgtgtcctgaagacgttcatagatttataggaaataaagccaaatgtagctcatacctctttataaaactaaactgttgttagataaaatgagaagagaccattccatcattgaagtgttggaatataaaaagacattccagagcatagccttttggtaactttctaggtaatcttgcaatctctccatactggctccatgttgaaattgctttttccctcaggaccctgggtaagatggctacatttaaggtgactctgaatggtggggttctagcttggtcactttcatttcttgccatcataaaaactagtaggctgtggagtgcgcttcctgtttgtgtcatctggtcgtagaaccttttccaaacagaagcatctgcctttggctgttctgtgacctttgaagccagtctcagtggtttaggcagctttgcagttctaactctagctagaggccaggctgtgtgcagagctaaagcacaaatgagcagtacatcagcatgggcagagaaaatacaggactccagatgggaaggttttaagagtcacactggcatggaaggcttatctgccattctatttatagcctgaaatgattctggcctaccctgtcctgtctgtatgatctaaaaaccagccttttccccagaaggctctgagcacatccagaagtgataacctgaccctccacaccaaagacaccctggtgctgctgctggtgagactggtgtccaaggcagggcccagcagaaactgcagcctgctgtctaccaaaggaggtacccgagttgggtactttaaaaaaaaaaaaaacctgcccttacccctctccctaatgggattttttttacctgttcctgggcccattacagagcctctgaagtttgcagtatgctttcaaatgaaataatatacttccattgattcaggaagcagattttttgagtgcctatatgtgagacagtgtgctggttgaaggcctgatgctgttattccaggagactgcaggcccttgatgccaggactctctctactaaggccagttcaggtctgggaaagggagctggcctattgcccaccacctgttgtcagtaggttaggagctgttgactcaggatgaggaagtatggtctttaaaaaaaacaaaatatattttagatttctcccctaaagttagttagagaaaaaggtctattcttcagcagatcactgtggcccctcttggagctgggtgttttcaaattttcttgaaaagtgagttgtgtcacagaatgtggatagtgagatttgcttctgggcctgtggttggacgcccacagcttcctttggaggggcaagaagttggcctctcggttgacattccagagaaatggccagacttgcccctacccttttgcccctggtgtagctgcctcacatgaggttattgcaagagttccccttgcaataccctttgtgccctcaagaattaaaagcctctatgatccagagttgctatgcaccaaattttgatgccttctaaataccttgatgcctgtagcactagaaatgctttcctatttaaaataaacattaaattttaaaatagagctttgtatactatgtaagcagttttatatcagctttgtaaaagctttggtgttaagagtcaatattttttggctttgtagataaagacttaaatttttgtgcaacatagtggtgttaaagcacacatccattggactatgcaaatcaatttctactagcagcactgagcaactgggcacgtgctagtacgcaccccctcctactctaactgtgctagctcttgggttgaggaatggaatgggtagccttctgcttactggagatgcacagagaaacatggctgaaaacagctttaaaaagaacatgtctttgggttcatgtgtggtgctgctgcccgggtgtaaactatccccacccagggccagccattatcaccagacctcttctgggcctggctgtgaagccctgtttttggtattcagaatggatctttaaggctcagatgggctcaaattgaaaccttgtgttttataaaatggatgtttagtaaaggaactggttctcagttatgtttacagcacttggaattgtgtgttcttgtacattttgtattttaaaaccttttatgggagtgcagtgctccttacacaaatacaaagggaagaagagccagcagttgaggctcctcagttttagtgctgaaataataaacagtgacaggtcaacagtatccttaatctgtctgagtgttcctccgcctggggttggtgtggagcccctcactttggggcaaagttaagggtcctgtgtcttttaaaaagtccatttggtcaataacttttcatttaaggaagagaagatcgagttccaaattgcttccgaggcttcagttctgtaccatttaatgcgtgcaaaggacattccatggtgtctgctgggttcagggcaactggctttcccaaggcatacaagaaaagttggcagaaagtcctcccctttaaaattcaagcctgaaggttttgtgtgggggcctactgccccctaatgtcttctggtgatactgcagcacagtccatcaaaatagtttgtggttttgccatctgttactccttatgcccacctggagaggggctagcatctttaggtgggaccacccctggcacaacatggtctctgaggtccagatactctgagggtaggggctggctctctctgcctccctatcccctacaagagggacagggagaggtagaacattgggatctttactcagaggctcagatggacccttgattctcccaggagtcatacattgaaggtaccagagcttccattttataaaagaaagcaagcctgccgtggacctgtcagccccacgatatctgtcggcatgggccacagccaggacagacttaagggctctccaggtgccagtcaagatgcctggctcaggccatcaggagctggttagccccattccacccccagccctgcatgcagggtccagccattgtctttgggggaaacaggcagaataagtggaggatggagctggggcttgggctcctctaggtaccttctgagagctttgacaagccagaaagaagctaccaggttgagggtgctggtcttctggactcaggagagacatgttcgccgaggatatcagctggctcttacctcctggctttctctcctacaaacacacccattccttgggggcttgtaacacagtgcgaggtgggtcaccaacaggcatcagactggtgtagtcatcagcgggtagctacagaagggacacagatttagggcagagagctcagccagacccgccaggccctccggccacacaatctcacctggtaggcctggaagacgctgagcagatccttcataccagccgtgtatgggacaccctgcatgcggaccaaggctcctgactgggacaacactgaggtgggagcagaggccagggcagcagtgggtgtagtgaggtagcccacagtggtgggggagactggggggctagggtgggagagacaaggtttagtcatgcatgccacctgtggcctagaccgagacctgtttccctcctcccttgtttctgccttgtgcttaattcagttcctccctgaagccccagcctctacagagtcattttcgatctgttttgtagatggcattagccagctgccaccttactcccttgtcatctcaagggaggagttatctggtccagaaaggggatcgtgacctttccccagattgggacagggagtgggactgtgatattctcttagctgcagggtaccttgggtagtaggctgtgtagttcaggtagagttgagtggctggccctggatagtaggcaacaggggtgggggcagcaggcaccctggcagctgggagcagtgctgaagaggggtatagagctgccgtctccgtgggaatgagcgttggggtggcttggaaggtggtgtaggtaggtggtgagaggcctagagacggaagtagaaagtgcatgtgcacggagcccagcactgccctgggtggggtagccagaaaggagtccccgctatagaaggtaggggcttacaacagcctggctaccacaggcctcctcctcccctagcccctagggcactcacagggcagcttgcagggtggaggggacatgccactgcggcccaaggtgccccccatcagcactcggctcatctcctctgtggaacaggggaccacctccacgtagcgctccttcatcaccttcttatggcaacgctgagcagcagctagggctcgctctgctgatgtcatctgaatgaaggcatcgcccgatggccggccctgtgcacaccatcttgtgagcagtttgtcatgtgtaagagtgccttacccctaacacacaccccttcctatttatgtgttccccctaccaagcagtggcttcacctgctggttgagcaccatgtgtacaccgtggggccgaatgtcagctgctgcctcccccagaaagctcaggatgtcttcaatggtggccgtgtagggcaggcctcggaggcgtacacagtccctcccagtcccaggtgccagtgggaaggggatgggcagcagtggggcagtcagtgtaggaaggagtgggccggatgcatagcggttcaagacctagtaaggaaggcagcaacaggctggtcatgccaagtagggcagggacacagagggccgccctggagtaacagtacatctgggggtggggagccctgggcgctcacctgctgcacttcggctgcagtgctccggaagagttcaatgtatcgcttacccagcatgcccttgtgcctgcgcagtgcagcctgtgccagctcctcacaagcaaagagggcgaaggcatcaccagtcggccggccatcaggatggcgcacaaagagcagcccctcggtacccccagtcactgggcactctggccccaggaagccaagcacgtccgttggcccagccgagaagggcagtccccgcagccgcaggatcacttggtcttcccgtgacaagaaacgagccacctctagtgatgtgcctgtgtatgagagtcgcctgctgacttcactcatgctcctccagacactcacccatgcaggggagcaggcaggcaaggggtggtggggaagtgaaatggatcaagaaccaggggagccaggccctgtttgcagtatactcaccccctgcaatctttacaaactcctcccctgtcgctttatacacctgtgggtacagagagcagcagcccatgggtctcaggcctgactcagattggccctgctccgctcccagcccaaagccccacctcaatatagcggacgcccatgtggtgcttgtgtctctgcagcgctaggtcccgctgctcgctgtccacaaagcggatgagggcctcgccatttctgcggccctgggcgttgaggcagagtgctacaccacccctgtggagccagtgctgttagtgcctcctgggtaggcctgtccaattgggcccacccaccctgccacacccacctggccacgttgagccctttgaagaagcgagccacgtcctggtctgatgactgccacggcaacccacgagcccgtaccacagtctcactgtccaccacatcagccttgctgctgtaggggcagggcacagtgctgtcagagctattcagctgttgtcacccccagcccctgctcccacactcaccaaggccccgtctcgtatttctgctttatcacctcgggcttcgaaaacaattgacctgagaaaagatggcctgggggtcagcagggtctggtggagaggggtgtccccaccaagttctgcaaaaagtggacaattgagagagatgaagaaatgacaggccgagcacagtggctcacgcctataatcccagcactttgggaggccaaggtgggtggatcatttgaggtcaggagttccagaccagcctggccaacatggtgaaaccccatctctactaaaaatacaaaaattaggtgggcatggtggcaggcgcctataatcccagctactctggaggcttagacaggagaatcgcttgaacccggaaagtggaggttgcagtgagctgagattgtgccactgcactctagcctaggctacagagggagactgtctcaaaaaaaaaaaaaaaaaagaaatgacaaagaggattcccccgtggtctcttagagaaggtcacagtggggaggagcaataggcatttgtcatccctgagaacaggtgacaggcagtgagggaaaccttactgctgggctctttgagtagatggaggataacagctaccattgtcttgacttcccagaccccaaagtcatcctctgtggcatctgtctccagtcctaaacctatgggcagagaagtgacagtgaagacatcttagcataagcactaatcctgtttactcctgggcccaactcccctccatagacacatgctggagaccagcatacacatttgttttggcccagttcatgtgtgcacatacagattcccagtccagacatagacagacacatacccacattccaaactcatcctagcacagacacgaagacacagtacactcagggacttagcagataacgcagtcttgtatgtgtccatattacccacccacagcatgcacatactcagacacatgtacccacagtggcttctccaccctaaccctgctgggtcacagataccctgtgccatggtggccacagtgaggtccctggcagggcaggtgcttggatgctgcatatggaattctcttcggaggtcatagaaggagaagaacatgtcggggagcaccaggttctgggggcacataggattgaggatgagcgccctgcccaccctcaggacaagaggggttctgggaaccttactgaccaccccaccccacccggttttccttcaggagcataccttcctggaggcctcggggtgcaggacctgtcgcaatagctgctgcccatcagtgcagagcatgtaggggcccccgcccagcaaagccacatccccgttcaccagctgtgagaactggggatagggaatggggagagagaaacacacagattcacagctgggcaggcaggaagtgagggtaggaggaaggaggcaggctgcaaagctggttcagccagatgttcagccctatcctgcctgggaataagaggccacgcctgttgagcctagccctatgtcccttcccctcaccccccaaccctgttccagtccactgtcacctcctccaggccaaatgagggcaatcacatataaccgaagccctcaacacacacactccaggagtttggagtggggccagagcaaacacctggagtgggacaagcaggtgggaaggggcggggcaaagcaggttaaacctgtctttgaccgggtaccaccctcagacaggtgggggaggcccaggcctgcctgaggcccagaaggctcatggtcaatggcagccccgcctccaggtctgaccaaccgaggggcagagaaactccaaggacagagctccacacttggacatcaggggcagcatgagctttgacccacatcctattgaccggctggcactgagctgtttgctcatagagggggtggcactcctgaggctgcccagccctcccccagcctccatccttgctggagaagtataaacactaatcagtgacccacgaaccctccctgccaattctgtgacactttacaacttggggctgacagagcaaggcaacccagctctcctccagcaaactccccaagtgaagggccgggagcccttctggaacagacaaggaatcatcatcgtggtgcctcctcatcaggaaccacaagagttgttggaagatgaaagaacgtgagtgtataaaaaggacttacactaattacactcaagagtcagacatagaatgagcgccgtagtgaagataaggaaaagaaaacagcaatggaaaccacctcccacttcagctagggcaggaggcaccccaggcctttgcactcagcaggcagatagtcccccaggccaggccgggacagcgcccacgcctggccagccggccgggacaggcctagacgagcagtttacacctggcggcgtctacctctagggccgacaccgccctacgcctccgctccagcagctcccaagcaggccgaagacgcgggccgcaaggacaggtgacctatatgggcccctcgacccctttcgcttccggctgcggctcagggagacctgacccagcaggtctcccaaaggcgtctcggcctcgctccccgggcgggaactggggatggatcccaaagcctgcgtcccgatcccttcggtaggagtaggttcctgcaatggttgaaaagtaaggagcccaggggaatggctggcacgcgcggatgaaaggggcacgcacacgcgagagtcgctcaaagtttcaaacaagagcccagtcctgccgcctggaccggttggttgcggcacgccaggcctagcctccggccgccaatcccgcccagaaatgtcctcacgtccaggccatgccgccacccaccccggcgctcacctgctgcagcaccttgtccagcggctctgcccgcgccaggctgtcggcgctcaggccgctcgcctcgcggcactgcgtactcagtgcggccgc

SEQ ID NO: 1637 - DNA, 431 bp, Homo sapiens
ctccctgtttctccctctctacaacctgtaatctattttcgtgtctctatggattggcctgttctggacatttcatataaatggaatcatatatgaccttttattgtctggcctatttcacttagcagactgttttcaaggctcatccatgttgtagcatgtatcagaacttcattacatctcaaggctgtatattccattttatggatagagacaacttacgttatccattcatcacttggtagacatttggattgtttccactttttggctattattaataatgctgctgtgaacatttgaaagtttttcatgtggacatatgttttcacttctcttgtaaatatgcctaggagtggaattagcatagactctttagttgataaggcaaggaatgaaatgatgtgagaactaaaggttcttatttgggg

SEQ ID NO: 1638 - DNA, 354 bp, Homo sapiens
tcggcacgaaccagcgatttgtgcagcgtccccacctgtgagcggcgggggaaaccgatcagccgcgcccctcgaccccggaagctccctggggacctcaccgcctcttttccaccctacctggcggctccgcggctcaaccacttgccaaactaggaggattaagtcggtctcgtccgagcccaggtcccgtcccagcgcacccgccgtagccccgaagaggacgaccagtgatccgggccaggggcaggggtccgcggcggggtcggccgcggggtcagggcccgggggagggggcggcggcggcggcggagtcatggccgcagaggaagggggctctcggccagacacgcg

SEQ ID NO: 1639 - DNA, 2357 bp, Homo sapiens
agtccacacagcaatctcctttcctcttcagtgagaacacctctcctttgatcaacattatttattcggcttagtttaaaattcctcttgaggagaagtttctgggactaaacatttgaaaatatttgaaataaaaaaattacctgtttttaagtgacaaaaattattaatttataagttacttaggaatgttctcaggtgcaagtaacagatgacacaaacacagcagattgaatcggcgatggtacaattttctcatgtaacataaatgcagcagctgcatttgttgggtggctcagtggccttttgggcttttccttcatggttgcaagatggcactactccaactcaagcatcatgtttgtattcaagacagaaggaaagggagacggtttgtatcagtcactctgacccttttatcagaattgcataagtgctcttagaagcagtctgcttctccctaagatctttgctcagatgttattgggcagagcttttttgtgtgtgtagtgtctaatggttgcaagggaggttgggaaaaatgattcttttttttctggcttttatagtggaagcaggcaaaagattagttgggtgtagttgttgggttagccggtcatcatgctctgcccctaagtgctcagaatactgaagactaaagatgcaatgacaaacaagatagtccttattgtttttgtttgtttgtttgttttttgtttttagatacagctataattttattacaaaactgttcttttggcattagttagttacagtgatagcaagataatgtgagtgtgcagactggctctgatggaaccactgtattccctgcttactgaaccaaacttcagctacctcatatccattacatacaagtgacctgcagttattactgctacaaatcttgacgcgtgtaccgctgagggaggagctgatgctaagggatttgattacatgttgataagactacaaaagttcgtttatgggactttttcttcctcttcccatgcaatgactttgctttagaacaatcacatggcttagagctagtctgagtagcagcagcacccaaggagcgtcagttcttgttaaaaagcaatacctgtgtgatgcatttttacgccacaggcaaagggaaggatcaccctcattttaaactcctgcagagtcccttaataaaatatcaaagcattccatcaagttcttctgggtggtgttattgctgtacatttgttggtgagtcattttctgtgctgtgtttgctttgaaaggatcttccaatttatctccaatattcctttcttatcatgtccttttctttagctaggatttcacataaccctaatgcattattaagaatgtcttccttattgacacactggttttctagcatgtcttcatagatacccacaagaaaggcaattaggtagggggaactatgacttggttgtaaatcaagtaattgatttaacagattaggatatttggaaagaccacgatcctgcaaaattcctttcaaatagttccatgaactattatgtggtactagttgaatcatttccagagtgtattggacttctctctccaatacagcacaatcattgtagccagtggtgttggaaataacaaaatatcttcggttccagacagagttatttctcacatcctctttgagaagttggtccacatactgcagctcattatcccaaagtttaaattcctgaataacccattgtcgatgctgccaggcatgataattctttgcatcctgattaagaatattatcaataaattcaggctcctgagatggatctcttagccattccactattactcgcctattgtgacaaactagatagtttttgggctgcccctcaattatttcagtgatgtagttcatttcctcatgtagatccttctgaagtgactttaagagaactctccggaaatgtcacactgtataattggctgcatttaactcaacagcatcccgggttagcttaaaacctcgttcgcttctttcttcatgctgcaggacagctcggaagtaatcaaacatctctaaatttgtcactataaatgatctggaccacgggattggggccatcattctgcggcactggatctgtatcagcccattctgttctgtccctgtacgggacataggagggcgaatccaggctcagaaacccgtcgtccatgggggacgccacggcttccccagcctctgctgccatctcttcctcgtgctgctcctggggcagcggtgggtgcggctggggcgggggctgctccagctgccggggctcaccgccttgcgcagcctccccgaccccctcggtggccgccatctc

SEQ ID NO: 1640 - DNA, 2357 bp, Homo sapiens; identical to SEQ ID NO: 1639

SEQ ID NO: 1641 - DNA, 11839 bp, Homo sapiens
gtcgactggaatacttgggagatgagatgacaggtctggtcatgaccaagacaaaaactcagcgtggcctcatggagcccatcactcacatcaggaagccccactccatccgggtggagacaggtgaggcgcagggctgtaagccagctagcatcttgtgcctggcccggaggcagggtagtgtggaagtggccagcatagctctacagtgaaacaggcccagggcctgtttctctgtggttctctggggtcttaggcaagtcccagagtcttcctgaagtccggctccctcttctttttcttcagtaaaacggtgagagagctaggaaactggagtgcagccatagagctgccgtccagtgtggagccttgagccacatgccgctggtgagcgcctggatcgtggctgccctgccttgagaagtgctgtcactgtcaactggacactggctttagtgtgaaaacaatatattttattaatcatttttatattgattacatgtcaaaatgacaatatttttgatatactgaattaaataaactatattactaaaatgagggcgggcacagtggctcatgcctataatcccagcactttgggaggctacggcggatagatcacttgaggtcagaagttcaaaaccagcctggccaacatggtgaaaccctgtctctactaaaaatgcaaaaattagctgggcatggtggtgcgcgcctagaatcccagctacttgggaggctgaggcaggagaattgcttgaatctgggaggtggaggttgcagtgagccaagatcatgccattgcactccagcctgggcaacaagagcaaaactctgtcttaaaataaataaataaataaataaataaacaaacaaacaaactatattactaaaatgaatcccacctgtttcttttttcctttttcagtgtggcatctagaaaactttcagtgacacgtgtggcttgtgcttgtggtttgcattctgtttctcttaagcagcactgctttagagcctgccaggctgcctgggttcaggtcccagctgtgtcgtgttagtgaaccccagagtggttgaacccctctggcctgtagtttcctcatctgtaaaatatgcacagggttgtgatagggctaaatgagatatgaaatgtattaagaggttctggctcattgttaagcactcaataaaaggtagctgctgttattatttttattataatccaaagatttggctatttggaagctaatttttcaggagtcttgtgtagggctgctgaggaggtataggacaggagaacgggagtctagctgccacagggaagctgtatttttagtccttcctagaaatggtgttgggataggcactctcagagcccttgagaagtgggtgagcaaggggacatggcagcagcctgtgctgagggtccttggacctcatgctaggattaccagcccagagggacgcttcataccgctacacctgggatcggagtctgtttctgatctaccgacgcaaggagctgcagagaatcatggaagagctggatttcagccagcaggttggtatggcctccatgccccagtcagaagccccttggggcgatgcctgtcttcagtcagctcatcttacctttctccatctctcggaggatattgatggcctggaggtggtgggcaaagggtggcccttctcggctgttactgtggaagactacacagtgtttgaaagaagtcagggaagctcctctgaagacacagcatacttgtgagtgcagcctgaaccctggggagagaggctgaagagttctccagcacctaccagtattaaagagcgggcttccctccctgagatcagggtgcctctagcctagcttctgtccagtggttgccacccactccttgaacccattccagcacctgtgctggctttcctattgccatctgctcctttccaataaccaactcctaatggggatttcccagacattcccttgctggtcaactgagggctctctagaccctcccactgctatgcatcttgaatgcctctggcatggagagtctgtgtatttctgtgtactgtgagtggctctggcaagagggcttaaagagtctgtgtgtttctaagaatctcccatctacagcaatgggtcaggaggaagctgcgtgggagtggagttgatcatactccattgcagggtagagctggttgtgtttctaggcttcctggtgaccgtttctgtggggttccacatggcatgactgtggcagcctaagagaaaataagtcattggcttttcttacagaggcacattggccagttcctctgatgtctccatgcctattctcggcccttctctgctgttctgtgggaagccagcttgctggatcagaggcagtaatccacaggacaaggtaaaacagcctccaccacacctgctgggagagcctccctcaggggtgcagccctgaggtgactggcagttaccagcagcctgcacagtctcctgtttgggtttttatctggtcgtgcattcagcacgtctgaaaatggtgacagcaacactgacttgagcaagaataaaatcacaaggctgcgagtgtcataagccacttggggcttatacccagcccccaagcatgtaaacaagcaaactcaagtaggtatggctctaagaaggttccaaaatattcttcagatgctaaggaatagaagtgttcattggatataaaatatattttatctggccaggcgcagaggctcacgcctgtaatcccagcactttgggaggctgacgtgggtggatcacctgacatcaggagttcaagaccagccctggccagcatggtgaaaccccatctctactaaaaatacaaaatagcagggcgtggtggtgggcacctgtaatccctgctacttggaaagctgaggcaggagaatcgcttgaacccgggaggcgggggttgcagtgagctgagatcacgccattgcactccaacctaggtgacaagagcgaaactctgtctcaaaaaaaaaaaaaaaatatatatatatatatttgttttatcttctcttcttgctattgagggtaacctcagagacaaccacgctggagtaggataccactctgtgtgacagtggccaagccctggaggcctgggacacgagacttgcagtgctaaagccagaaaagtcctgggcagaccagatgagttgttcactctaggccagggtttgcagcaaagacatttcttgtccctcctccttccagaggcaggttgggattgctgctcacttgacctttgaaaccctagaaggcgagaaaacctcctcagaactgactgtggtcaataatggcaccgtggccatttggtatgactggcgacggcagcaccagccggacactttccaagaccttaagaaaaacaggatgcagcgattttactttgacaaccgggaaggtactcgggagaagccaccctatgtgctagctcctgtctggggctggttttgtcctccgtgagacatcaaagtttagttatggcccagctcctgtaagtttgagccctgcttccctgccttgtccctctcattccttctgtgaaatgtgtggcctgactactcatgtctgttgagagactgatggaacttgagaacctggggaggtgagccaccagggagcagaagcgttctaggggctcagttatctaggtgcacaggcctggggctaggatggccagctgtctctgtttgcctgggactttagcactcaaattcccacattccaggaaacctctcagccctgggcaaactgggatggttggccagccacctggcctgggactcagttaactgcatgtaggagcatgtaggcctggggctcagccagctcctgcatgttgaaaacctcgggtctctgtccctctcaggtgtgattctgcctggagaaattaaaacatttaccttcttcttcaagtctttgactgctggggtcttcagggaattttgggagtttcgaacccatcctactctattaggaggtgctatactgcaggtcaatctccacgcggtctccctgacccaggacgtttttgaggatgagaggaaagtactggaggtaagggacccaggaccatggcccctgtggacatcaggtagggtatcctggtgttcttcctggcagtgactgaagggatcatatttctcccagcctaagaggagaattggatttttagcaaacaggtaactactcttgctccacaaacacttcccagggcttgtgatttaaaagatgggtgcgctggctaggcaggcatggagcagcttgcagcaatgccatgcatggccccactgagttagaaagaaattagactgagccttaagaggcagactgtaaagtacaatgtgtggccctatgtactggtctgtgttttgttcatcgctgtctggtactacacagtggagttgcatttaagcgacaagacttcaaaaccagggagaataattaattaatacatagcagcatgagtctgcccaccgtcccactcaatcagctgacaactcgagtgagtgtgaggtgggagcttggaatctgtcgtccgcagtcagtttcacagtgtggccatttgagccgtgcatcctgggatttggtggaaagctgtgcttttttattcattgtggcccccaatcacaaggccggctccttcatgtggggctcagccagtggtgatcaaaggtaattttgacaatgtcatgcttgctttactcattgactgtacaacccatgtctcacacaaggcgcccctcccgtgtttctgtgacactcactgaagcctgatgaaggttcaccaccatcctcagaagcacccccactatgtgccctgccccttcttcctaatctggtgacatgctaactgtgtgaccaccaggccccaggcagcagcagctgtcactggaactggccctcctctggatccttttcatccatttttagggaacaaggatgtctggagagactcagaggttttcaggtcttagaacaggcgtgtgtgtgtgtgtgtgtgtgtgtgtgagagagagagagagagagagacaatggcaggaactcagaccctaggaaggcacaaagtcctgggggctccaacttcctgaaggatgcattggttttgatagcctgggctgccatcctctgccaccttcccttttgcagagcaagctgactgcccatgaggcagtcaccgtcgttcgcgaagtgctgcaggagctgctgatgggggtcttgaccccggagcgcacaccatcacctgtggatgcctatctcaccgaggaagacttgttccggcacagaaatcctccggtgaggcccagcgccagcccctgccccctcatgtgtgccctgcgtcaagggtccccaacccgcaggccgcacagcggcaggtgagcagtgggtgagccagcattactgcctgagctctgcctcctgtcagatcagcggtggcattagattctcataggagcacgaatcccattgtgaactgcgcatgcgagggatggaaattgtacactccttatgagaatctaactaatgcctgatgatctgaggtggaagtttcatcctgaaaccattccccaactccctgccatccgtggaaaaattgtcttccacgaaaccagtccctggtgccaaaaaggttggggactgctgccctaggtgacagtaatagcaaactcttttatgtgccaagctctgttctgcgcatcttccatgagtaactcacctctcttcacagcagtcctatgagatgggtactatttatttttgtttatttttttaagaaatagcgtgtcatactgtcacactccaggccagagtacagtgtcccactcatagctcattgtgacctcaaactccccggctcaggtgatcctcccacctcagcctcctaagtagctaggactacaggcatacatcaccatgctcagctaatttctctttttttttttggtagagataggatcactctatgtcatacaggccggtcttgaactcctgagttcaagtgatcttcctaccgtggcttcccaaagcactgggattgcaggcttgagccactgtgcctggcccttgtactatttatgtccttatttacattgaagaaactggggcctgcaccccagcctccccctcacatgccttcccatcctctgctgcagctgcattatgagcaccaagtggtgcaaagcctgcaccaactgtggcgccagtacatgaccctgcccgccaaggctgaggaggccaggccaggggacaaggagcacgtcagccccatagccacagagaaggcctctgtgaatgctgagctgttaccacgctttaggagccccatctccgaaactcaagtgccccggcctgagaacgaggccctcagggaatccgggtcccagaaggccagagtggggaccaagagtcctcagcggaagagcatcatggaggagatcctggtggaggaaagcccagatgtggacagcaccaagagcccctgggagccggatggccttcccctgctggagtggaacctctgcttggaggacttcagaaaggtgcttccaagaccctggaaggcaatggtagagaatattcctgcctcgaaccaacaagggaggacccagcagcccctcttgctctatgggcaaagaaacaaaacctgagagcccagagaaagtgatctcttgggttatctatctatctatttatttatttatttatttatttttgagacgaagttttgctcttgttgcccaggtgggagtgcaatagcacaatctcggctcactgcaacctccacctcccaggttcaagcgattctcctgcctcagcctcccaagtagctgagattactggcatgtgccaccacacctggctaatttttttttttgatggaatcttgctgtgttgcccaggctggagtgcagtggtgcaattttggctcactgcaacctctgcctcccgggttcaagtgattctcctgcctcagccttcccaagcagctgggactacaggcatgcgccaccacatccagctagtttttgtatttttgtagagacggggtttcgctatgttggccaggctggtctcaaactcctgacctcgtgatccacccaccttggcctcccaaagtgctggtgttacaggcgtgagccaccacgccaggccaattttgtatttttagtagagacggggtttcaccatgttggtcaagctggtctcgaacacctgacctcaggtgatccgcccgcctcagcctcccaaagtgctgggattataggcgtgagccactgtgcccagctgggttacctgtttttgtctggggtgcccaagctgctatattccaggaggggggcctactctctgaccctggcaaatcttggagaaggggttcataggtacagatttctgaggggggtccctggctcccaccaaaggcacccagacagctctccatagctgcatcccctcctggttcctggtcccctgccacccatccccacatcaccatgcccttcactagaggacacagccttggtgtcctggtgcagaatggtgcccatgaccctgccaggcagtgatggtgctccctgatgagaaccacagagaggatgcgttgatgaggctcaacaaagcagccctggagctgtgccagaagccaaggccattgcagtccaacctcctgcaccagatgtggtaggtgccctgccaggagagctgccccatctccttccctttgtggcatctgcaggggtcctgggcaggcagtcctgggactccaggggtctgagcttccgttgagctcaggttgctagagcatgccgcaaacattccacgttctggaaccctgccagtgcctactgctcactggagagcagtcacagcagatcaaacaccttatcttttttttcttcccctttttgccttgttccttctcagtgagcaggggaatggaaaaaggagaagccagagggcaggaagaagacggggggcagattccaataaaagcttcatttctctgttgtcaccctcccctgtacctgtttggaacttgcttgtataggcgtggggtccttttcaaggccctcaggacaagccccaggagccttatgctggaagtctcatgcaaggttcagcccctccagtgcgactggacccaagtctggccctggcctcaagccctctgaagtaggactgaattcatgcaggcctcctaaccctagtcctgggccatttttttcttggttgccacccaaggcaagccagaaccccctccaagcacttgccctggcggggaacagtgaggatgctggctgttcaggggtgtggcatttccacagcagctcgtggcaccagggtctttgaagggagggacccaagcctctgcaggttcaaggacaaatgaggagtgatggcatttctccactgtgtcttgccctctagtttgcagctgtggcgagatgtgattgacagcctggtgggccattccatgtggctgaggtctgtgctgggcctgcctgagaaggagaccatctatttgaatgtgcctgaagagcaaggtcagatcttgtgcaaccaaccacacctctgcatagccctcctcatctctctgaatggacaagcagcagtgcctgggccagtcatactcctttggtggaagctctgctaggttgagcccatggagtaggccccttacccctttctgtccgctgccaggatgtggtacccagaagctaccttagtgaccaccttggtttagtaatcccagcaaagttaaatgacttatccatggccattcatggcatggcagagctgggaccagaacataggcaccacagtcctgtttcatgaagccacgcgcctaccagggctcaaggctattgccctttgcttttccacctcccctcaagcctcctcacgtacctgcagcatccactaggctgttgggggcctgccatattttcttccacccacctcccttagatcaaaaatcacctcctatcatggaagtgaaggtacctgtggggaaagctgggaaggaggagcggaaaggagcagcccaggaaaagaagcaactggggatcaaagacaaagaagacaagaaaggagccaagctgctcgggaaagaggcatgctggggcgtggtctgggccaggtggggctggggaggggattggaggggctgcggaggtgggggctgtggaggtgggcatgtgcccaggctctcccagtgagctactgttgaggacatccttggcctacctctggagctcctgaaggctatgtgtgtctccctcccccagcaggaccgtcccaacagcaagaagcacaaggcaaaggatgacaagaaagtcataaaatctgcaagtcaggacaggttttctttggaagaccctacccctgacatcatcctctcttctcaagaacccatagaccccctggtcatggggaaatacacccagagcctgcacagtgaggtgaagggaagcgcccagcagccattcccctgcctcccacctgccttattcattccgttcagtctgcagacaataagtgcccactccatcatggtggaagcagagctgcttcaggaagggcatcctcgtgtgtgagacaggcctcatgaataaggaatgcgcctagcatgttaggtgatgagtacgacgggagagaagatagaccaggcagggaatggaggcacagaggcctcagtgaggaggtgacaacccacaaagatttgaagggaggggaagggtggccaagtagacgtccagtaaagagtgctccaggcatggggagcaactgccataggagggaggggccagaagggagagggcagtagtggggagcaggtcataggggtgggggatggtttgcaggctattgtgaagacttgggatttttcggagtgaaatgagaagtcacgcaaggttttgaatagaaacgcaatagggtctgataggctttagaaggtggctctggccgccctttggagaacagactctaggggaacagagaggaaggaagcccttctctttcttactccccgttaggtgcatcctggcagatgcgttccttgggagaacaccatgcagggtgcattcccatcaactgtaagagtttgaaggactagagagacttcatcctaatccgttcttaagtagcaggtccttagaaattcacccaggttttccgttttgtttgttagtgttgttgtttgttttggaggggaggtccacaaagccattttcaatatgtcagtatgtctattggcgacgtcttgccttcctctaatgtggatagctggggagctgggattacatcatgtattgtggtcacactctggatctcatttgatcaaaagttccatttgccactggtgacatcactaagatatcagatggttgatggggtctagaaagtaattaaagggctctgaggacccatgggggtcaacgtcaacccttccatggctctttgatattaagaatcaacttgcagaccaggtgcggtggctcgtgcctgtaatcccagcactttgggaggccaaggtgggcagattgcctgagctcaggagttcaagaccagcctgggcaacatggtaagatcccgtttctactaaaaattcaaaaaattagccaggcatggtgacactcacctgtagtcccagctacttgggtggctgaggcacaataatcgcttgaacccgggaagtggaggttgcagtgagccgagatcacgccatttcactccagcttgggtgacaagagtgagactcttacctccaaaaaaaaagaatcaacttgctggccagtggctcacacctgtaatcctagcacgttggaaggctgaggcaggtggattgcttgagcccaggagttcgacatcagcctagacaacacagggagaccccatctctgcagaaaaaaaaaagaatcaacttgtctgggcttgtatgatccaaccccattggaggggtcagtcccagagacctttcagtctgtggatacaggaaggaaaattggcctccaggaggccagagtagaactggggctgagcccaggcccaccccaaacggctaaatgggcaccgctccatgggctccctggagttgccccttgaacaacttagctctagtatctccatatgtcaaaggtaccagcgcagggccacctccccagactggtttgaaaagtaaaactgcaaaagcaggtggattgcttgagcccaggagttcgagactagcctgggcaatgtggtgaaaccccatctctacaaaaaatagaaaaaagtagccaggtctggtggtgcacgcctgtagtcccagctacttgggaggctgagatgggagaatcacctgagccagggaagtcaaggctgcagtgagccatgatcacaccactggactccagcctgggtgacagagtgagatcctgtcaaaaaaaaaaaaaatctgcaaaaccaaaaattatttcacaagaactttgaacttgtgaaattctttcacaaacaactggtttctttcccctctccagctattctctcacagcatagttcatatataggtgcttcccacagagtaaactctgcctgtgatgttgtcccgttcttccaggtccgtgggctgctggacaccctggtgactgacctgatggtcctggctgatgagctcagccccataaagaatgtcgaggaggctttgcgcctctgcaggtgactctcgggcccaagcaaccttctggaaaacgggttaataaataaatcaataaagaaccttcaagtttctactac

SEQ ID NO: 1642 - DNA, 4225 bp, Homo sapiens
ggaggcaaacgcacgcgggaagagctgctacccattccagggaccctgccgctgcccctctgaggggtctgcacctcctgggagcaggtgggtctctgggacgagggtccatggtggatggctctggagacgctcccgaggctgtgccgtcccgctgctgcacaggtcggagggtcaccgcagaggctactcgggctggggctggggccgagggagcccgcactggaggtaagcttcctccctggccccctccctggcagtggcggcatggaaggcgggggttggtggggagcaaacagtggttctggggcttagtctcttttccaggtgcgagggagaaggctgagctgtagaggacctaaaggcttctttcctgccacccctccctccctgccgcccccaaaaagggactcagggccccctccccaaccatcctgggacttagcatctttggtggcatcttagcatctttggtggcattccccacagactccttctgcacatctctgctgtttcctcttcttcagcccctcatgcacacctctagcctcagggcagtcccccctcccccatcttctgtgctcccgggatgcagctattacagtggccagaagcttagagttcaagctcaccccctgtcccttacagcatcaagaagggcactgtcattccccactgctcaggctggatctgacttggaggcaggggctggagcccaccttagcagaggacgggaagagggtgtgggctgggctggtgggtgcacagactttacgcaaactcatgcacgtgtgactggacagatctgggttctctccatctctccgaaacccttgctggggatgagcgatctgcatttttcggtcctgacttttgggaaactctccagatccccccatcctgcaggccctgagaagagcagcccctccctactgcgcagttctccttgggaccctgtatgcaggagagagctgatactccgtgccccgtggcccatcccaccgcctgctggccctgctcccatcccctcagcttcctccctcctctgccctctcgtcatctctgaattctcaggccctgccctctctgtgcccttccctccacctgacagggtctggctcaaggtcactgcagtaattccatacccagctgcccagggctgctgctgctaccgccaccgccttatcggccgctgggtttctgttacactcccttttatttctgggcatatcgtgttcgataaaaccctttgcttgtaacactgctggcagcgctcccagctgctccctcccgcgttcccgcgttccttcctttcctcctcccttctctgcgcttgggcaggcttcttcctttcctcctcccttctctgcgcttgggcaggcttcttcctttcctcctcccttctctgtgcttgggcagcctcaccttgtcccctcaaactccagagaaggaaaatcaaggtgcctccccatgtttctggccccgcccttccccccagcccctgcaggggtgtgcagagaatgcccaccttctgtgagaaaggtccaggcagggccgctgggcccacaccgagagtcccctcccagaggctggtgcccccacacaggccaggccggagggccagggcagccaggtccaggtagggctctggtgcagtcacagtgcccgactggttctgctagttccagcggccagccggtaggggcgtgtgctgggcgggctttggtgcacattatttcccatcttgactctgccacccccagccacgggttggggaggtgaaggcaggtctgagtcactagcaagggggagggcaggagttaaacaagttgtggccgtggcattcccacagaaggcccacgacccgctggaaggaaagagatagcagacaaaaggtaggctgcgctgtgggccaggcactctccacctcgcccactcccacggtatcttattctctgggcccccaacaaaacctgccaaggcatgttttcaaagcgtggggctgctttgaactgagcccagcactggcggggctggggtggaaggagcgtggaatcgggtgcgagaggacagtctccttcagattcctgcttctggcagcctggggaccagttggggcacgggctgggatggagggtggagccgaaaggtgtttggtgggtgggggacagttcacgggtgaagtggaggctctgcaggcccagacagtgtgtgtgtgcatgcacacaccagtgctagtgtgggaggaatggtggtggtcagggaattcctcttttggtttctgaaagggcctttgggaggaccttgggcctggagttgtattcagcagatagcctggacctgtggctactggggggaattgggctggcccagctcttctccctgctggggtaccagaggtccactatgtgtccagcgttttggggctttggagaacccagactgttcctactctcagggagcttccattctagctgagaaggtgggactgagacagtaaagcaatccgatgaaataatgaccaaactgggtaacactgacaataagaattggattagtcttctggagtcctggatggtagtccaggctctgccacttacgtgccatatgatgcaggcaggtcccatcccctctctggcctcaacacttccatgtgtacgtgggggtggcatgcaggagtgttggcagtggccagaactctgaggggcagtcttcctcaaacgatacttgctctcttgccttctggcccaggtcatagcatttcttctgagccgccctcccctgacttgctggttcactcctccttactcttcccttgtgatcttggatctcagctctgtcaccacctcctctaggaagtctcccctgattttcctggcttgggtcttcctgtgcggctctgcactcccacactggactgtgattttctgtaccctctcaactgaacgtgggtggaccaaggcgtgtgttctgtgcctggcatggtgcctggctcagaaaaggcctccgggaaataggtgttgaatgcatcaaactacaaaaattaacaatatgagaaaagtgagctgaggagctaggaaggataggtcttaagctagatctcagcagaaacagaggcagtggccgagcagaagcaaggcaagcgggcattcctggaatcctgttagcgttcccccatgaggccatgcactcttaggtggggcttcctggggtcatcttggttccccatgcagcagctctgtgatctcggacaagtcacttaatattacagggtctcgctctgttgcccagtggcctgaccatggctcactgcagcctccaactactggcctcaagtgatcctcttgccttggcctcctgaagtcctggaattacaggcgtgagccactgcaccgggcccatttaatactctgagccccacctttcccatctgtggatggaggtaatgataatagcatctttggggtgtggctgtgaagatagatagatgagcatgcaaagctccaagtgcctgctgaattgtaagtgaaataagaacgtgtgccgctgaaggctgtccctggaggcagggacactctggccaggcctcatttagttggtcagtggctgagtgacccatgaggtaggcctctgcccctgagttcctggccctctcttcctcagccccatgtggaacccaaggatgcagctgctctgctaacacggcagcccatccttcaagactgtgacctcgccacagtggccctcagccctccacctccggcgggggcgagggccacccacctccaagtctccagccatgacgacctccgcactccggcgccaggtgaagaacatcgtgcacaactactccgaggcagaaatcaaggtgcgcgaggccaccagcaatgacccctggggcccccctagttcgctcatgtccgagatcgctgacctgaccttcaacacagtggccttcaccgaagtcatgggcatgctgtggcggcggctcaatgacagcggcaagaactggcggcacgtgtacaaggctctaacattgctggactacctgctcaagacgggctccgagcgggtggcccaccagtgccgcgagaacctctacaccatccagacactcaaggacttccagtacatcgaccgcgacggcaaggaccagggcgtcaacgtgcgcgagaaggtcaagcaggtgatggccctgctcaaggatgaggagcggctgcggcag

SEQ ID NO: 1643 - DNA, 2894 bp, Homo sapiens
aagaactgcaccaaactcaaatccctggatatcggcaaatgccctttggtatccgacacgggcctggagtgcctggccctgaactgcttcaacctcaagcggctcagcctcaagtcctgcgagagcatcaccggccagggcttgcagatcgtggccgccaactgctttgacctccagacgctgaatgtccaggactgcgaggtctccgtggaggccctgcgctttgtcaaacgccactgcaagcgctgcgtcatcgagcacaccaacccggctttcttctgaagggacagagttcatccggcgttgtattcacacaaacctgaacaaagcaaatttttttaaaagcagcgtatgtaagcaccgacacccactcaaaacagctctttcttccgggaaggttattaggaatctggcctttatttttcctcatttctcatgggcaacagaggccaaagaaacgaagcaagacaaacagccaaacaggcatttaggtcaggtcatttgtaggcagtttctcttctcacaaaagatgtacttaagcaggctgatcgctgttccttgagcaaggcgcttactctcctccgctcaggcccccaaggcctgccctttccctcgcacacaggccccacccccacagttccacgccccccccccaaggccacaccctccctccctagagcagcagcgaggatccatcatcagaatcacagtgctctccagacctcctctctaaactgcttcattgacctaagtcactctcttcaatcccacacccatggacattcttgtcaactcaataccatagcactttgcataggcaaaatacttttcaggcctttttaaaaaattcattacagcaaacagctggggaaggacatgcagtcctcccccagctctgtcaatgactatgaccttggccaaagcacttcactgctctgggctgcagcttccagcactgaatcagaggccacacagcccaaagattagcttcatgtccattatagcattgagggagcagagatacccatacacagaagcaccttggcatagagcacccaggcatcgacctcttccaggagaactgattctgtggatggatgtgatttcaggagattgtgcagtgccagcatcagtgcataaagggtcctgtatgtcctttggctgcaaatcacccacttccctgtgtttcagtgggagaatttcctctcccacctcctcacatcctcttttgccaggctggatgctgtcgtctctgtacacaaatactttctgcattcccccctccacaccatcctagcgaggcaccagcacacctaatcacagcaaagcccagatccccccatcagttgcttttactcagtgttttcaaataggagtaaaggcccttgcaatttttaattaacaagcaaggcccaagggaacacatgtcctcaaaagtttttctgatccctcgccttgcacacctggcatgcatcaggcacatctgtcctacagctggcagagacagatgcctcggttctttgtcattcagattgcatttgacctcttctcatctatttatttctttatacatccagacttcatcacatgaagcctattggggttaagtttgtaagtgtttaattgtgcaaattgccaccctgtgtacctcctccatgtctgtctgcgtgttttccaccaaagaatgcaaagcagacttccaggtgtttaaattctgttcactcaacaatgccagatgaatggaagagggaacacactgagatgacttagactctggtccaccaaccagacccttggaaaggaatactaaaatcattacaaggtatggattttaaatggatgaaacttcaaattatcttatttggatagaagtctatattctagcctcatttgcatgaagtcagatagccagaagaaattccattgctggttttcacgaaattcacttgtcttttgctaataaacacatggccctttcccagattattctctagccaagccccacctttgttacgttgaaatccctcatttattttcttctcaaaatgcccattatccaaatgcagaacctctgcatctccaagccagttatgctgaatttgtcaaacttagacacccttgacaactgcactcctactgtaggctcctgtgcatactgtcgtcttctgtgggggatggagaggttagtgtgatgaggtggtgtctgcccaggaggtttctttcaaacatcatggcctcccatccaatcaacatcatcaaattacatgtgtaatcaaggctctgtgccatgggggaaatgaatcatttagctaggccaggatctagtgaaagccacagagtttaaaaccatgaaagaagttgaaggcagcattcctcagctctgtgacttgtgaccctatttgaagtttcaggatttgggtgtcacaaaggattgtccctaatccttggccctggggtcttccgagtgagctggtttaatactctgagaatgagcagggagatccagagaatgaatccctgaccgcatcacctaaactgtcttccaaacatgagacaaagctgactgttcacactgattgcccagcacataccgtcttgccagtttcttcttttctcccagtctcctgttcatccattctgttctcccttggggtgggaatctatgatggaggttactggggaaacagctcagcagatttttggagaccaaaccaaaggtctcactaggaaatttatctgttttaaaacattgcttccttcctggctctgctaaattgaatgctcattgtttgttgttgttgttttttaattctaatgttcaaatcactgcgtgctgtatgaatctagaaagccttaatttactaccaagaaataaagcaatatgttcgtaatca

SEQ ID NO: 1644 - DNA, 6547 bp, Homo sapiens
ggtctgtgggttctggcaccacctgagcccactgggcatctggtcatccctggcacctctcctttggagccaccttgtccctggctagacagtcacattttccagtgccgttttggaaagatgttgcctttggagaaggcgtttgcctcccccaggagctccccagccccgccggatctgcccacgccggggtcagcagccggagtccagcaggaagaacccgagaccatccctgagaggacccctgctgacctggagttctcccgcctgcgtttccgggaatttgtctaccaggaggctgccgggccccaccagaccctggcccggctgcatgagctgtgccgccagtggctgatgcctgaggcgcgctccaaggagcagatgctggagctgctggtgctggagcagttcctgggcatcctggcctgataagtccggcctgggtgtggcacagtacctgagagctgcagaagcagcctcctggtggagggcctcgctgatgtcctggaagagccaggtgggctgtcacagaggagaagcatggctcagaggagatggggaggggatcctggaaggccccagtgccagccatggcttgcctgagatagttaagttccccacactgctgaggcagctccttggtcctcgggccaggacagatgcctgggctcctgccttctagatgtaaggaagccagaggaatgagggaaagggaccagcctcttttatttacttatttatttatttatttatttttgagacggagtctcagtctgtcactaggctggagcgcagtggcgcaatctcagctcactgcaacctccacctcctgggttcaagcaattctcctgcctcagcctcccaagtagctgggattacaggcgcctgccacgatgcccagctaatgtttgtatttttagtaaagacagggtttcaccatgttggccaggatggtatcaatctcctgacctcgtgatctgcccgccttggtctccccaagtgctgggattacagttgtgagccaccacacccagcccagcctcttttttttttttttttttttttttttttttttttttgagacggagtctcgctctgtcgcccaggctggagtgcagtggcgggatctcggctcactgcaagctccgcctcccgggttcacgccattctcctgcctcagcctcccaagtagctgggactacaggcgcccgccactacgcccggctaattttttgtatttttagtagagacggggtttcaccgttttagccgggatggcctcgatctcctgacctcgtgatccgcccgcctcggcctcccaaagtgctgggattacaggcgtgagccaccgcgcccggcccccagcctcttaacagtaaatattctgggtactttgcaggctggaggtctcctggtccaagatgaggtgcaggatgggtagtgatgtggccctggagcctgcaggtccctgtggtttaactgtgtgattgttgttggcacgtgtcctgacctcttggggtcacaggtccctccactgttgacagggatgctgctgggctcccctgcgggctcatcctcaattcttagcgatggagtgtacgagaggcacatggaccctctgctgctaccaggcgagctcgcgagccccagccaggcccttggagctggggagatcccggcaccttctgagacacgtgagtgcccagctagcctggcagcctctgctgggccttaggtggggtgttgggcagaggcctgtggttgggagagggcagaagggcagccagggagtcaggggctccatggtccatgctatcattgggacttcctcctgtagtttctctgaatgttagacattgtttattaaattagtcttcagagattatgcagatcatccatacttaccacaaatagtgaagaaacatcaatacataaagaaaagaatctcccaacccccgaccatgaaccctctgaaaataaagggtctcaagtgtcctgatgcacgtcccctcatgtctccctgcacatcacacatgcataatcagggcctggggtcgggctctgtgtgtgtggtgtgctgtgtctgagtgcttgctgttcgaggggtgggtcccccaggctgtggttgggtctggttctttagttgcccagcatcgcgtgctcagcccatccccatcctagaggtgggctctctgccccttggagtgaagctgccctgacacctcctgacttgtgtgcccatatgtgaggctctgggcactgtgggtggactcctcaggaccactgggcaagtggtgtgtgagttcgacatttcacataaaatagaaacttccatgtggttttccagaagttttgtggctgttcattaccagcacggaaggtgcccactggcctggatacagcccagcactatgtggtgttgctttttaggatttccacgaaggccaggcacagtgcctcatgcctgtaatcgcagcactttgggaagccaaggcgggcagatcacttgagcccgggcattcgagaccagcctgggcaacatagggagaccccatctctacaaaaaatacaaaaattagccgggtccgcacttttagtcccagctacttgggaggctgaggtgggaggattgcttgagtccaggaggtggaggttgcagtgagccaagatcatgccactgcactccagcctaggtgacagagcaagaccctgtctttaaaaaacaaacaaaccaaaaaaaaaaaagatttccatgaatccagtggacttgaatgggcatctctggggccacccaagccctgtggccaccgcgctgctttgtaaatcagggaaaggtgtagtgtccgttgagccttgggtgctgctgtcacagaagcacactggggcctgtgtgggaggcagcgggggctccttgacccttgagggcacctggccacagggagctcattgcctcagctctgcctctccttctccccagcctggctttctccggaccccctgtttctggaacagaggagggtcagagaagcaaagaccgaagaggacggccctgccaacaccgagcaggtgggtgggcacgagcaggtgggtgaggggccttggcctcagcttagaggcatccccctccccatcaccagtgctcagcagagggctgtggccccaaacgtccacagcgctgaggcccagaacccaccctggtgggagcgtgagggcggaatctttgtggtgcgaagggggctgcctcctgcagtgcacctgggttagagtccctggccagggctggctcctagcctgctcctgtggctgtggggctgcggcgggtcctcccttctctagggcaggtgggaggtctcagccacgactaatgtttcagaagctgaagtcctttccagaggaccctcagcacctgggggagtggggccacctggaccctgccgaggagaacctgaagagctaccggaagctgctcctgtggggtgagagtcgcctgcctcggggtcacgccccactccccatccccttccgcaggggttggtgcaggagactgtgaccccagggactttggctgggacactgtgatgtcttacaggatttgaacttgcacgtgttggagcttgaatttattcgctgaagcccccaccctttctgatctaaacatctgagttctgcccaggccctgcctgtaggactgaagcctcggaatttggaaaggcctcctggccccaaggcgcccacattgccaccctccttgccagatacagggcctcacctgcatggcctgatcaagggtctcctcttttgtagacgttcttgccccagaaaccctccttttagggaggccccccgactcagactcctgagcaatttttgtcaatgtctttctttagctttgctttctctgagtcctgcctccgcctgccccgttgcccttccagcctcgccttcttctttgctccactgtccaggggcctaacagggaggtggccttggtgggggtcccagtacagagaagaggaggtgggctgcagcctgccctggctggcccacgacacacaacacccatcagccactctgtgttgatgccttttatttctttggtttttaaccccactcagggtatcagctttcccagcctgacgctgcctccaggctggacactgaggaactccggttggtggaaagagatccacaaggaagcagcctcccaggtgaggttgggttgaattggtgttagggccgggtggggtttgctttttcttcagaggctgagggggcccctcccagcgccatcagccccagcaaagacctcagcattgactgcttcaccattctcccaccaccgtgtctgagtgaggcaggaatccagttacgtccatggtctcttgctgcatgacagaccaccccaagacttggtcggtggaaacggcagtggtgttagttgccaggatctgtgtatgactggtcccgggggtggccgttctgccccattggaggctctgtgccagcacaccaacaagaacacctagaggcggacttgggctggagggccctgggtgcctgtcgccagggggcttgtcgctggggggtttggccttagctattgaccccactctcttcgctggcagccgggcccctccctccaggagggtgcgctctgagcaggctctccttgcatcgtgcatcttgtggccaagctagtggccaggtggagacctccaaaggcgcggtttccagaacccgggctcagtggggctgtccttcctgtcctgtcggtggcctccgttgttggaggcctccaggtcccacatctgcagcagcaggcgcggggcatgcgctgcagggctgcctgggagggacagcgctgcttccaaacagccgtgagccccgcggggatccagagcccggagccctgtgcgctgttccggcagctgaggctcggctgggtcctcctctccctggccctgggcggggcgctcacgctagggctctgaccttgttccagaaggcgggaggcggcaggagagcgctgggtgcgcctgcgaggaggccgcccccgcgggggtgctgcctgagctgcctacggaggcgccccctggggacgcccttgccgatcccccgtcgggcaccactgaggaggaggaagagcagcctgggaaggccccggacccgcaggacccccaggacgcggagtccgactctgccaccggatcgcagaggcagtccgtcatccagcagcctgccccggacaggggcacggcgaaactgggaaccaagaggccgcaccccgaggatggggacgggcagagcctcgagggcgtctctagctccggcgacagcgcagggctggaggccgggcagggccctggggctgacgagccgggcttgtcccgcgggaagccctatgcctgcggcgagtgcggggaggccttcgcgtggctctcgcacctgatggagcaccacagcagccatggcggccggaagcgctacgcctgtcagggctgctggaagaccttccacttcagcctggccctagccgagcaccagaagacccacgagaaggagaaaagctacgcgctggggggcgcccggggcccccaaccgtccacccgcgaagcccaggcgggggctagggcgggcggtcccccagagagcgtggagggcgaggctccccccgcacccccagaggcgcagaggtgagccgctgtgctgtcccgttccggaggggccgctttgccggccgtgaatcccagacgaggcattgggcctttccacgcccctgggtggcggcttcctgtggtgtttgtggacgtcctctgcctgtgccctgaatccgctcctgaggctaagcgctcccaacgagaagggtccacgggaagccctcacctctgtaaacacaccctgggccagcgctcgcatccgaggggagccgccggatgtggaagaagactcggctttcctgcagccatttagtgccgccccatgctaggttatttgacattgtgcagtgtagagttgccttaaagtgcgtgatctgccagtgctttcttcaagtcacccttgccccgattcctcctgtttgcgctccccagggttgctcaagtggaaattttgtcagctgtttagccttttcgtacttggcgtgatgtcaacttcacttctaatctgcaaaagcagaagctgtttcctagtttacctcgcgtgtgtttacctatatggagtagctcgcagagatcacagaaatgcttgcagcctaaggcagggttttcagaccgtgggtcccagcccatttagtaaaatgggaaatcaattagcaagtggtcaccagcattacacagcaatgaagcagaataaagtaggccagaatgcatcatgtagtaaaggcaaatactgttttgtgaaacttttcacccatacatctaaatgtgagaactggttgcaatgtaagacatttcttgctgggaagttgtgagcaaaataagttgaaaacactaataaagatctgtctgtctgagcaaaggagactaaactccttgggctacataaggtg

SEQ ID NO: 1645 - DNA, 1487 bp, Homo sapiens
ggtgctgcctgagctgcctacggaggcgccccctggggacgcccttgccgatcccccgtcgggcaccactgaggaggaggaagagcagcctgggaaggccccggacccgcaggacccccaggacgcggagtccgactctgccaccggatcgcagaggcagtccgtcatccagcagcctgccccggacaggggcacggcgaaactgggaaccaagaggccgcaccccgaggatggggacgggcagagcctcgagggcgtctctagctccggcgacagcgcagggctggaggccgggcagggccctggggctgacgagccgggcttgtcccgcgggaagccctatgcctgcggcgagtgcggggaggccttcgcgtggctctcgcacctgatggagcaccacagcagccatggcggccggaagcgctacgcctgtcagggctgctggaagaccttccacttcagcctggccctagccgagcaccagaagacccacgagaaggagaaaagctacgcgctggggggcgcccggggcccccaaccgtccacccgcgaagcccaggcgggggctagggcgggcggtcccccagagagcgtggagggcgaggctccccccgcacccccagaggcgcagaggtgagccgctgtgctgtcccgttccggaggggccgctttgccggccgtgaatcccagacgaggcattgggcctttccacgcccctgggtggcggcttcctgtggtgtttgtggacgtcctctgcctgtgccctgaatccgctcctgaggctaagcgctcccaacgagaagggtccacgggaagccctcacctctgtaaacacaccctgggccagcgctcgcatccgaggggagccgccggatgtggaagaagactcggctttcctgcagccatttagtgccgccccatgctaggttatttgacattgtgcagtgtagagttgccttaaagtgcgtgatctgccagtgctttcttcaagtcacccttgccccgattcctcctgtttgcgctccccagggttgctcaagtggaaattttgtcagctgtttagccttttcgtacttggcgtgatgtcaacttcacttctaatctgcaaaagcagaagctgtttcctagtttacctcgcgtgtgtttacctatatggagtagctcgcagagatcacagaaatgcttgcagcctaaggcagggttttcagaccgtgggtcccagcccatttagtaaaatgggaaatcaattagcaagtggtcaccagcattacacagcaatgaagcagaataaagtaggccagaatgcatcatgtagtaaaggcaaatactgttttgtgaaacttttcacccatacatctaaatgtgagaactggttgcaatgtaagacatttcttgctgggaagttgtgagcaaaataagttgaaaacactaataaagatctgtctgtctgagcaaaggagactaaactccttgggctacataaggtg

SEQ ID NO: 1646 - DNA, 1487 bp, Homo sapiens
ggtgctgcctgagctgcctacggaggcgccccctggggacgcccttgccgatcccccgtcgggcaccactgaggaggaggaagagcagcctgggaaggccccggacccgcaggacccccaggacgcggagtccgactctgccaccggatcgcagaggcagtccgtcatccagcagcctgccccggacaggggcacggcgaaactgggaaccaagaggccgcaccccgaggatggggacgagcagagcctcgagggcgtctctagctccggcgacagcgcagggctggaggccgggcagggccctggggctgacgagccgggcttgtcccgcgggaagccctatgcctgcggcgagtgcggggaggccttcgcgtggctctcgcacctgatggagcaccacagcagccatggcggccggaagcgctacgcctgtcagggctgctggaagaccttccacttcagcctggccctagccgagcaccagaagacccacgagaaggagaaaagctacgcgctggggggcgcccggggcccccaaccgtccacccgcgaagcccaggcgggggctagggcgggcggtcccccagagagcgtggagggcgaggctccccccgcacccccagaggcgcagaggtgagccgctgtgctgtcccgttccggaggggccgctttgccggccgtgaatcccagacgaggcattgggcctttccacgcccctgggtggcggcttcctgtggtgtttgtggacgtcctctgcctgtgccctgaatccgctcctgaggctaagcgctcccaacgagaagggtccacgggaagccctcacctctgtaaacacaccctgggccagcgctcgcatccgaggggagccgccggatgtggaagaagactcggctttcctgcagccatttagtgccgccccatgctaggttatttgacattgtgcagtgtagagttgccttaaagtgcgtgatctgccagtgctttcttcaagtcacccttgccccgattcctcctgtttgcgctccccagggttgctcaagtggaaattttgtcagctgtttagccttttcgtacttggcgtgatgtcaacttcacttctaatctgcaaaagcagaagctgtttcctagtttacctcgcgtgtgtttacctatatggagtagctcgcagagatcacagaaatgcttgcagcctaaggcagggttttcagaccgtgggtcccagcccatttagtaaaatgggaaatcaattagcaagtggtcaccagcattacacagcaatgaagcagaataaagtaggccagaatgcatcatgtagtaaaggcaaatactgttttgtgaaacttttcacccatacatctaaatgtgagaactggttgcaatgtaagacatttcttgctgggaagttgtgagcaaaataagttgaaaacactaataaagatctgtctgtctgagcaaaggagactaaactccttgggctacataaggtg

SEQ ID NO: 1647 - DNA, 575 bp, Homo sapiens
aagaaaaaaaaattatttactaacagtcgattgtcctgtgttggtgttgctgttgcttatatattggtttgcactctgctccatacagtgattcagggatccaggccccatctctgttgtagctctgctcttcactgtacccttggagcatgtagggaaggccgaacctgttcacctgggagatgacacacatcacttctactcacaaatccttggagagaaatgatcccatggctccagtcacttgaaagggcctgtgaactgtcacctggagtgcctgtctccgcaacagttacaagcttagttcccctcttagcctatccatcttaagccccaagctgagtgtggttctggtaagaaaaaggctaaaatggtctgggcacggtggctcacgcctgtaatcccagcactttgagaggcagaggcaggtggatcacctgaggtcaggagttcaaaagcagcctggccaacatggggaaactccatctctactaaaaatacaaaaaatgagccaggcgtggtggcaggcacctgtgatttcagctactcaggaggctgaggcaggggaatcgctt

SEQ ID NO: 1648 - DNA, 577 bp, Homo sapiens
aaagaaaaaaaaatttttactaacagtcgattgtcctgtgttggtgttgctgttgcttatatattggtttgcactctgctccatacagtgattcagggatccaggccccatctctgttgtagctctgctcttcactgtacccttggagcatgtagggaaggccgaacctgttcacctgggagatgacacacatcacttctactcacaaatccttggagagaaatgatcccatggctccagtcacttgaaagggcctgtgaactgtcacctggagtgcctgtctccgcaacagttacaagcttagttcccctcttagcctatccatcttaagccccaagctgagtgtggttctggtaagaaaaagggtgaagatggtctgggcacggtggctcacgccctgtaatcccagcactttgagaggcagaggcaggtggatcacctgaggtcaggagttcaaaagcagcctggccaacatggggaaactccatctctactaaaaatacaaaaaatgagccaggcgtggtggcaggcacctgtgatttcagctactcaggaggctgaggcaggggaatcgctt

SEQ ID NO: 1649 - DNA, 859 bp, Homo sapiens
tgtgttgatgccttttatttctttggtttttaaccccactcagggtatcagctttcccagcctgacgctgcctccaggctggacactgaggaactccggttggtggaaagagatccacaaggaagcagcctcccaggtgaggttgggttgaattggtgttagggccgggtggggtttgctttttcttcagaggctgagggggcccctcccagcgccatcagccccagcaaagacctcagcattgactgcttcaccattctcccaccaccgtgtctgagtgaggcaggaatccagttacgtccatggtctcttgctgcatgacagaccaccccaagacttggtcggtggaaacggcagtggtgttagttgccaggatctgtgtatgactggtcccgggggtggccgttctgccccattggaggctctgtgccagcacaccaacaagaacacctagaggcggacttgggctggagggccctgggtgcctgtcgccagggggcttgtcgctggggggtttggccttagctattgaccccactctcttcgctggcagccgggcccctccctccaggagggtgcgctctgagcaggctctccttgcatcgtgcatcttgtggccaagctagtggccaggtggagacctccaaaggcgcggtttccagaacccgggctcagtggggctgtccttcctgtcctgtcggtggcctccgttgttggaggcctccaggtcccacatctgcagcagcaggcgcggggcatgcgctgcagggctgcctgggagggacagcgctgcttccaaacagccgtgagccccgcggggatccagagcccggagccctgtgcgctgttccggcagctg

SEQ ID NO: 1650 - DNA, 575 bp, Homo sapiens; identical to SEQ ID NO: 1647

SEQ ID NO: 1651 - DNA, 582 bp, Homo sapiens
ctgactgagccagaatcagtaacgtccatgtctctgctggcatgacagaccactccaagacttgctcgtggaaacggcagtgtgttagttgccaggatctgtgtatgactggtcccgggggtgcccgttctgccccattggaggctctgtgccagcacaccaacaagaacaccttagagccggacttgggctggagggcccctgggtgcctgtcgccagggggcttgtcgctgggggttttggccttagctattgaccccactctcttcgctggcagccgggcccctccctccaggagggtgcgctctgagcaggctctccttgcatcgtgcatcttgtggccaagctagtggccaggtggagacctccaaaggcgcggtttccagaacccgggctcagtgggctgtccttcctgtcctgtcggtggcctccgttgttggaggcctccaggtcccacatctgcagcagcaggcgtggggcatgcgctgcagggctgcctgggagggacagcgctgcttccaaacagccgtgagccccgcggggatccagagcccggagccctgtgcgctgttccggcagctg

SEQ ID NO: 1652 - DNA, 3207 bp, Homo sapiens
aaaaaaactacactcagcccagcacattgatcaagtatctatctctgagcagttggccttgccagggagagcagagatgtggcaggctccttcagctggagacagggagcttctcagagaagtgagcagagactccacagacaccctaaaaaggcttctactcaagaagtaaagccactactcctgcctttttgcttagtggacaggaaggcacaggagtttgtctgggacatcatagaaattcttaggtttaacttaattctggtcattgtcttctttatttcctgtttttcttccctttgtcagtcttcgcatccaagatttcttccctccctcttgtgggccagcctgtcctgttccagagctagcctgttcctgggtagccttccttagcctccattcagcctcaggtcttttgccttcttccgtgtttatttagagagcagaatctaataacgggttccactgtagccactatccatggacttctgggtcctcttcaggtttgagtgcttgaaaatgttcattctctgggcttgtggcctgtctcctccactctcctcctcaccctctcgctccttcctgtgtgagggccgctctgcagtaatgttctcaggcaagccttcctaggcacctcagaaactactttgccagagccagtaagaatatataatattggagcagttgccaggatagaaattaaatatagattccagtttaggatagagtttttaccgagagctcttcagacagtatacctgtgtcttctctggcaattgctttcattttagtcctatataaaagctttccttttctgtttttttttaaaactatgcttttgcttgcctaaatcttttgatcttatatttctctcatctcagagcctgtcctgagttgtaaggtatttcatactgccttacttaaaagttttttaaactactagagtcatttgatacacacagaagttacctaataatccaaagatgtccatcaagggaggaagggtgggtcatcagactttgcctttgatgttgtagactaggctcctgagttaagcagcagagggacagcagtgccatgtgccttcactgtgtcccaggaaatctgggttggttccagtgggaaataccagtatttcttggttctggaaagtagcaaaagagtaggagatggggaaatagggatggggagagcaagccccgcatgtccatggcgagtcaggtggggagcacgggtggaagggccggctgttgacagacagactaagctgtgtggtgctcttgccgccccttcctgggtacagagcttgagaaaaatgcagccgaccactccctgtgtttgtacagagcaaagcccaaaagccaacctcagatctcctgatttggcagctgaagaaatcagcagagtcctgattgcctgattcagtcccaaaaatgaatgtcaggccccgccccctccccaccaacattgcctctcctacattctccttctgcccctaaatcagacaggaggccagagaggagtattgctcaatgcgtgctatgtgcaactcctcaggccttgtgccacctccatgctgagcccctgaagcagggtgtcctgggtgcctgtgtgtcagctccctcctctctacctacctctgaccttcttgtgggtgagggtggccatgcttatggccatcttaaaactggagaggcagagaactacttatgagtctgtagaccacgtgttgtcttccatggcctgtttctcctgctgtctgggtgagtgagcctgcaacgcaatgcccatgagagtaaatgcctcctgacctaccctgctcagcactgttctagtgtcttggccttgaaagaaaagcctgacttcctgctgacacatgtggtaggggcatggcagctatgaggcacctcctacgtctgttttctggctgtggtgacttgggatttttaaccttatatatctttttcctttactcaaaacaaaacaatttttagcacactgaaaaaaaaaaaaagccaaatgttttgtgcctttctaaggcagcactgtatcccaggctgcattttaggacttaatatggaaataccagagtctgagctcctctaccttgagtttcattagtccttagtgtctaggagacaggaaagaatgctctctgtgactggagaggtgacatgcaggtgcagtgtgtctggagtccctttcccctgctgtgagacttcagtggaggagagaagcattgtaccctgggatcatttggttggttccaatcacaagcttagttatcaggttgcatgccttgtctcctgcaaaagacagaatgtttcacaattcccaggtaaactctggaccattccaagtgtcctagccttctgatgacattaattacctagttgtgtggaggagtataggatggactcctgagaaggggaggttggtggctttgtcttttctttttgctggatcctgaactggtctagacctcctgcccccaccccccagcccccatcagatgtggctggcctttcatttgaaggcttcagacttaaagcattaagcagctagtgccctctgcagggcctggtttccccagggaagggcagcaaggaacatgggaccagaagcctgtcctcagtaatgtgactatagtgagctttagcaaaagtttttctatataatgacatcttacttatcttttaccctttcctcagttttcccctgcctttaactaataaagaattgggagacagaaattttaaagtcctccttattcaagattttgaaattcttagcctgggagtgctggagagaacctggtgctttctccagaatgaagagtcccaatttgtatatcagtgttaagaagaaaacaaaacaaacacataggtgagattttcgtggactattttaaaaatgtgtcattaatataaaaaatttatattagcagtatttaatcattctcacctgtaaagaataagaaaaacagaaggtaaatattcttacagagaatagcagagctttaagattcattttcattttaagtccattttattttgccagtgtattaatgtttagaagtctgttttactaatgttatttattaattttttttcatttccatacacagttagttaactaaagagctttttcaagcacccatgtctgtaaaaaaatatttttaaataaagtttcttttgttgtagcaga

SEQ ID NO: 1653 - DNA, 3206 bp, Homo sapiens
aaaaaaactacactcagcccagcacattgatcaagtatctatctctgagcagttggccttgccagggagagcagagatgtggcaggctccttcagctggagacagggagcttctcagagaagtgagcagagactccacagacaccctaaaaaggcttctactcaagaagtaaagccactactcctgcctttttgcttagtggacaggaaggcacaggagtttgtctgggacatcatagaaattcttaggtttaacttaattctggtcattgtcttctttatttcctgtttttcttccctttgtcagtcttcgcatccaagatttcttccctccctcttgtgggccagcctgtcctgttccagagctagcctgttcctgggtagccttccttagcctccattcagcctcaggtcttttgccttcttccgtgtttatttagagagcagaatctaataacgggttccactgtagccactatccatggacttctgggtcctcttcaggtttgagtgcttgaaaatgttcattctctgggcttgtggcctgtctcctccactctcctcctcaccctctcgctccttcctgtgtgagggccgctctgcagtaatgttctcaggcaagccttcctaggcacctcagaaactactttgccagagccagtaagaatatataatattggagcagttgccaggatagaaattaaatatagattccagtttaggatagagtttttaccgagagctcttcagacagtatacctgtgtcttctctggcaattgctttcattttagtcctatataaaagctttccttttctgtttttttttaaaactatgcttttgcttgcctaaatcttttgatcttatatttctctcatctcagagcctgtcctgagttgtaaggtatttcatactgccttacttaaaagttttttaaactactagagtcatttgatacacacagaagttacctaataatccaaagatgtccatcaagggaggaagggtgggtcatcagactttgcctttgatgttgtagactaggctcctgagttaagcagcagagggacagcagtgccatgtgccttcactgtgtcccaggaaatctgggttggttccagtgggaaataccagtatttcttggttctggaaagtagcaaaagagtaggagatggggaaatagggatggggagagcaagccccgcatgtccatggcgagtcaggtggggagcacgggtggaagggccggctgttgacagacagactaagctgtgtggtgctcttgccgccccttcctgggtacagagcttgagaaaaatgcagccgaccactccctgtgtttgtacagagcaaagcccaaaagccaacctcagatctcctgatttggcagctgaagaaatcagcagagtcctgattgcctgattcagtcccaaaaatgaatgtcaggccccgccccctccccaccaacattgcctctcctacattctccttctgcccctaaatcagacaggaggccagagaggagtattgctcaatgcgtgctatgtgcaactcctcaggccttgtgccacctccatgctgagccctgaagcagggtgtcctgggtgcctgtgtgtcagctccctcctctctacctacctctgaccttcttgtgggtgagggtggccatgcttatggccatcttaaaactggagaggcagagaactacttatgagtctgtagaccacgtgttgtcttccatggcctgtttctcctgctgtctgggtgagtgagcctgcaacgcaatgcccatgagagtaaatgcctcctgacctaccctgctcagcactgttctagtgtcttggccttgaaagaaaagcctgacttcctgctgacacatgtggtaggggcatggcagctatgaggcacctcctacgtctgttttctggctgtggtgacttgggatttttaaccttatatatctttttcctttactcaaaacaaaacaatttttagcacactgaaaaaaaaaaaaagccaaatgttttgtgcctttctaaggcagcactgtatcccaggctgcattttaggacttaatatggaaataccagagtctgagctcctctaccttgagtttcattagtccttagtgtctaggagacaggaaagaatgctctctgtgactggagaggtgacatgcaggtgcagtgtgtctggagtccctttcccctgctgtgagacttcagtggaggagagaagcattgtaccctgggatcatttggttggttccaatcacaagcttagttatcaggttgcatgccttgtctcctgcaaaagacagaatgtttcacaattcccaggtaaactctggaccattccaagtgtcctagccttctgatgacattaattacctagttgtgtggaggagtataggatggactcctgagaaggggaggttggtggctttgtcttttctttttgctggatcctgaactggtctagacctcctgcccccaccccccagcccccatcagatgtggctggcctttcatttgaaggcttcagacttaaagcattaagcagctagtgccctctgcagggcctggtttccccagggaagggcagcaaggaacatgggaccagaagcctgtcctcagtaatgtgactatagtgagctttagcaaaagtttttctatataatgacatcttacttatcttttaccctttcctcagttttcccctgcctttaactaataaagaattgggagacagaaattttaaagtcctccttattcaagattttgaaattcttagcctgggagtgctggagagaacctggtgctttctccagaatgaagagtcccaatttgtatatcagtgttaagaagaaaacaaaacaaacacataggtgagattttcgtggactattttaaaaatgtgtcattaatataaaaaatttatattagcagtatttaatcattctcacctgtaaagaataagaaaaacagaaggtaaatattcttacagagaatagcagagctttaagattcattttcattttaagtccattttattttgccagtgtattaatgtttagaagtctgttttactaatgttatttattaattttttttcatttccatacacagttagttaactaaagagctttttcaagcacccatgtctgtaaaaaaatatttttaaataaagtttcttttgttgtagcaga

SEQ ID NO: 1654 - DNA, 3207 bp, Homo sapiens
aaaaaaactacactcagcccagcacattgatcaagtatctatctctgagcagttggccttgccagggagagcagagatgtggcaggctccttcagctggagacagggagcttctcagagaagtgagcagagactccacagacaccctaaaaaggcttctactcaagaagtaaagccactactcctgcctttttgcttagtggacaggaaggcacaggagtttgtctgggacatcatagaaattcttaggtttaacttaattctggtcattgtcttctttatttcctgtttttcttccctttgtcagtcttcgcatccaagatttcttccctccctcttgtgggccagcctgtcctgttccagagctagcctgttcctgggtagccttccttagcctccattcagcctcaggtcttttgccttcttccgtgtttatttagagagcagaatctaataacgggttccactgtagccactatccatggacttctgggtcctcttcaggtttgagtgcttgaaaatgttcattctctgggcttgtggcctgtctcctccactctcctcctcaccctctcgctccttcctgtgtgagggccgctctgcagtaatgttctcaggcaagccttcctaggcacctcagaaactactttgccagagccagtaagaatatataatattggagcagttgccaggatagaaattaaatatagattccagtttaggatagagtttttaccgagagctcttcagacagtatacctgtgtcttctctggcaattgctttcattttagtcctatataaaagctttccttttctgtttttttttaaaactatgcttttgcttgcctaaatcttttgatcttatatttctctcatctcagagcctgtcctgagttgtaaggtatttcatactgccttacttaaaagttttttaaactactagagtcatttgatacacacagaagttacctaataatccaaagatgtccatcaagggaggaagggtgggtcatcagactttgcctttgatgttgtagactaggctcctgagttaagcagcagagggacagcagtgccatgtgccttcactgtgtcccaggaaatctgggttggttccagtgggaaataccagtatttcttggttctggaaagtagcaaaagagtaggagatggggaaatagggatggggagagcaagccccgcatgtccatggcgagtcaggtggggagcacgggtggaagggccggctgttgacagacagactaagctgtgtggtgctcttgccgccccttcctgggtacagagcttgagaaaaatgcagccgaccactccctgtgtttgtacagagcaaagcccaaaagccaacctcagatctcctgatttggcagctgaagaaatcagcagagtcctgattgcctgattcagtcccaaaaatgaatgtcaggccccgccccctccccaccaacattgcctctcctacattctccttctgcccctaaatcagacaggaggccagagaggagtattgctcaatgcgtgctatgtgcaactcctcaggccttgtgccacctccatgctgagccctgaagcagggtgtcctgggtgcctgtgtgtcagctccctcctctctacctacctctgaccttcttgtgggtgagggtggccctcgcttatggccatcttaaaactggagaggcagagaactacttatgagtctgtagaacacgtgttgtcttccatggcctgtttctcctgctgtctgggtgagtgagcctgcaacgcaatgcccatgagagtaaatgcctcctgacctaccctggtcagcactgttctagtgtcttggccttgaaagaaaagcctgacttcctgctgacacatgtggtaggggcatggcagctatgaggcacctcctacgtctgttttctggctgtggtgacttgggatttttaaccttatatatctttttcctttactcaaaacaaaacaatttttagcacactgaaaaaaaaaaaaagccaaatgttttgtgcctttctaaggcagcactgtatcccaggctgcattttaggacttaatatggaaataccagagtctgagctcctctaccttgagtttcattagtccttagtgtctaggagacaggaaagaatgctctctgtgactggagaggtgacatgcaggtgcagtgtgtctggagtccctttcccctgctgtgagacttcagtggaggagagaagcattgtaccctgggatcatttggttggttccaatcacaagcttagttatcaggttgcatgccttgtctcctgcaaaagacagaatgtttcacaattcccaggtaaactctggaccattccaagtgtcctagccttctgatgacattaattacctagttgtgtggaggagtataggatggactcctgagaaggggaggttggtggctttgtcttttctttttgctggatcctgaactggtctagacctcctgcccccaccccccagcccccatcagatgtggctggcctttcatttgaaggcttcagacttaaagcattaagcagctagtgccctctgcagggcctggtttccccagggaagggcagcaaggaacatgggaccagaagcctgtcctcagtaatgtgactatagtgagctttagcaaaagtttttctatataatgacatcttacttatcttttaccctttcctcagttttcccctgcctttaactaataaagaattgggagacagaaattttaaagtcctccttattcaagattttgaaattcttagcctgggagtgctggagagaacctggtgctttctccagaatgaagagtcccaatttgtatatcagtgttaagaagaaaacaaaacaaacacataggtgagattttcgtggactattttaaaaatgtgtcattaatataaaaaatttatattagcagtatttaatcattctcacctgtaaagaataagaaaaacagaaggtaaatattcttacagagaatagcagagctttaagattcattttcattttaagtccattttattttgccagtgtattaatgtttagaagtctgttttactaatgttatttattaattttttttcatttccatacacagttagttaactaaagagctttttcaagcacccatgtctgtaaaaaaatatttttaaataaagtttcttttgttgtagcaga

SEQ ID NO: 1655 - DNA, 863 bp, Homo sapiens
aactccatcagtcccctaattgtcagcctttacctccctcccagagcaaggagtttagggattctaaagcttagtgtccacacatcattctaccagaccttagagctttagaagctcaatctaaaatactgtaactcagcataaactattactatcactcctttgaactcagtctccatgagcagtgttttgttggaaatacatagaacggcttaatgcctagagggtggtggatagtgaaggacggtcaaggttatatttttgactgcttagggattctttggatacaagaaacagaaatgttcaagcggaataaaggagggagtggagttgtggtaaggatgcagggtatttcgcagaacccaggacgggaagtgcctttggttcttgggtggagctggaactgcagagctttgcacctagtcctttctcccgcttcacagtctgcttatggtatatgtggcccccaaataggcactctagtcctcaagtctacaccaccttccaactctggggatcaccatgaacaaattctcaatttcccatacttaattttttttttttttgagatggagtctcgctgtgtcgcccaggctggagtgcagtggtgcagtctcaactcaccacaacctccgcctcccaggttcaagcagttctctgcctcaacctcccgagtagctgggattacaggcgcctgccaccatgcccagctaatgttcatatttttagtagagacagggtttcaccgtcttggctaggctggtcttgaactcctgaccctcatgatccacccacctcggcctcccaaagtgctaagattacaggcgtgagccaccgcgcccggcccatacttcgtattctta

SEQ ID NO: 1656 - DNA, 4428 bp, Homo sapiens
caatgtatgatttctgggacaattaagctttatttttcatatatatatatattttcatatatatatatacatacatatataaaggaaacaatttgcaaatttacacacctgacaaaaccatatatacacacatatgtatgcatacacacagacagacacacacacccgaagctctagccaggcccgttttccatccctaagtaccattctctcatttgggcccttctagggttggggccctgagcttggtttgtagaagtttggtgctaatataaccatagctttaatccccatgaaggacagtgtagacctcatctttgtctgctccccgctgcctttcagttttacgtgatccatcaagagggctatgggagccaagtgaacacggcggattgaggctaattcacctgaactcaaaaacagtgcccagcttcctcaccgcaggcacgcatcttttctttttttttcctcgagacggagtctcgctgtgttgcccaggctggagtgcagtggcacggtctcggctcactgcaagctccacctcctggattcataccattctcctgcttcagccttccgagtagctagggactataggtgccaaccactacgcctagctaattatatattgtatattagtagagacagggtttcaccgtgttagccaggatggtctcgtcctgactattgtgatccgcccgcctcggcctcccaaagtgctgggataacaggcgtagagccaccacacctggccccggcacgtatctttcaaggaatagacaccagttcctggcttctgaccaaagaaaaaatgtcacaggagactttgaagaggcagacaggagggtggtggcagcaacactgcagctgcttctggatgctgctggggtgctctccggagcgggtgtgaacagcgcacttcaacatgagcaggcgcctggctccggtgtgtcctcacttcagtggtgcacctggatggtggaagccagcctttggggcaggaaaccagctcagagaggctacccagctcagctgctggcaggagccaggtatttacagccataatgtgtgtaagaaaaaacacgttcttacaagaaactctcctacccgctcgggagactggggctccttgcttgggatgagcttcactcaacgtggagatggtggtggactggtccctgaaaagcgggccttgcaggccaaagtgaggtcctcaggtcctaacccagtggccctctgaaagggggtgtgcaggcgaggggagcaggaggcttctctctagtccctttggaggctttggctgagagaagagtgagcagggagctgggaatggtccaggcagggaagggagctgaagtgattcggggctaatgcctcagatcgatgtatttctctccctaaaagtgggtagaggagaagaggggaacacggagacggtgctgagttgaaggtgtgagcaccgagaggaaggagagatggaagcagaagccgatgaatttggtgggcagcgttggggaggaagctaggatgggcatggcaggccagggaaggagggcggcccccgtctgactgcactggtgaaatggccacacccagagccacgggcattggtcaggaaaaggtgatgggacagggtctttctcagtcttcctccaagctccctcagccacttgcttggccctgccatctgtgagtagtgttaagaaggcaagatggggcctgctccctatctctgacaaagagggatgaaggatagagagaaccgttagtccctactgcccccggtccctgaggatgtggcaggctctggccacaggaaccgcctcctacctggtctcccggagccctcttgtcaccgctgctgccctgcaggaggcccatctcttctgggagcttatctgacttaacttcaactacaagttcgctcttacgagacgggggcagcgtgctgggaggagggagggaggtgagaggttggtatctcagggccacaggaagagaagggcccgctgtgaaggatgtggaatggatgagggctccttgctccagggccagcccagggcagggaagcaggtcatgagaccatgtggctgatggaagctgggcagtgggtagtggagcaggcagcaccctgacccagggccccactcctgctgtcaaggggcaggcgggcgctgggcaggcagcaggctgggtggcaaaacgggcgggggcggaggggccggtgttgggcttacatctcctgcttccctgagcgcctgcacggcagcttgcccttcttatagaggaaatagaggacagcgcccagcaccgccaggaccaggatgcacacaatcacagccacgatgaccacgcccccggctctccggctccggcagctttctctctgcgccacaaagacactcctcgtcactccctgccccaggccacttcgtcaccatcgttgccccagccagtccagggccgacaagatggggctgctactcacctttctggacagggctctctggggagggacagggcagaaaggatgccctggcacagccctgttctcttgccaggcctggcttacctgtggaggtgctgttggctctggtatgaggactggcagtggaagtgctgaggccagtggttgtgttggagtctggtgtgagggtggttaaattgactaggaggcagagggaggggtgttaggagaagcgcaagttactgcccgtgcctgggcctgcccctgccatcccctgcagggatgcagccctcacccagctccaggaagaggatgctggtgtttttgcccaggtcgttggaggccgtgcattcaacacctgtctccaacagctccggggtcacgaggacattcagggtgctcaggactcgctgtggatcttggtcttgttcacttgcctgcgaggaaaggaaggaggcagctcaggggatggggaggatctctggtcctggccacaaagcgcaggcagggattaggagagtgtggcagatgagacacccgctcaccgtgccgttgacgttccaggagatggtgggccgggggtgccctgacgcttcacaagacagattcaacaccatattctctttcacccacaccttcctctccttgaatgccatccaaggggggccttggggaggtagggagaggtgaggtggcaagcccagctagcctgcctccccctccgcaccagagctccccagggcagcaggtggctttttgtcaaagagcttaaaaaccaccccacttggggtgacctggtctctaccccagagggagggcctcaccaaaaatggccacgttgaccagctgtgtgcggttcaggccgggtatgctgggcacagacgccacgcagcgatagccgcctcctgcctcccgtttcaggtcatgcaactgaagcacaggccccctttccagcacctggcctgtctgggatgagagatgggtcagagggtctgggaaagagcacattcttgtcacccgccagccccacccaccccatcagccccttgccccagacccgcctgggtacctcttctctcagcctctggaactcgagctcctggctactctctgctcacaggtcaggtgaggctgctgccttcctgtctctcaggggctgcgggactcactcggacgtcagacacatctgggggtacagcaatcatgtcacccagggcagggtggggccagttccctattgccccagcctggtccccctgtcctgggtccccagcccctcacagttcaccagtagttcctgtggttcactcagcagcgatatcatggtgtccaagtccaggccctgacattcatagcgcccactgtgttccttccgggcaggctccagcaccaggaccccgttgtcgttggttgtctcttcctctgcctccctggtgctggggttctagggaggattggggaggtgagcagagtgcacctcccgccactccacctgggtctctgcttgcatccccacctgcacccagcacaaagcccccacacctgcttgctgatgctgaagtgtggtggagggttgccatcagccaaacacctgatttccacgcggtccccttccttcagcattcccacgggctccacttccagccacactttttctgtcgggtctgcataggcaaagggggtagctcttggcccatgagtcaacctgggctgataagggggagccagcaggagtttccagcagccccagccccagtaagcagagagtcaggttagtactcacagaaaacagggacggtgacttccctggactccttcatgtggttcccactgggcagccggtagttgagctcacagtaaaactgggcatctttgtcttctttaaccagctgtgccttcagaatactctgcaaggtgtacaaaccactcgactccacagtctgggacgactgaatgtggac

SEQ ID NO: 1657 - DNA, 863 bp, Homo sapiens; identical to SEQ ID NO: 1655

SEQ ID NO: 1658 - DNA, 3439 bp, Homo sapiens
caatgtatgatttctgggacaattaagctttatttttcatatatatatatattttcatatatatatatacatacatatataaaggaaacaatttgcaaatttacacacctgacaaaaccatatatacacacatatgtatgcatacacacagacagacacacacacccgaagctctagccaggcccgttttccatccctaagtaccattctctcatttgggcccttctagggttggggccctgagcttggtttgtagaagtttggtgctaatataaccatagctttaatccccatgaaggacagtgtagacctcatctttgtctgctccccgctgcctttcagttttacgtgatccatcaagagggctatgggagccaagtgaacacggcggattgaggctaattcacctgaactcaaaaacagtgcccagcttcctcaccgcaggcacgcatcttttctttttttttcctcgagacggagtctcgctgtgttgcccaggctggagtgcagtggcacggtctcggctcactgcaagctccacctcctggattcataccattctcctgcttcagccttccgagtagctgggactataggtgccaaccactacgcctagctaatttttttttgtatttttagtagagacagggtttcaccgtgttagccaggatggtctcgtcctgactttgtgatccgcccgcctcggcctcccaaagtgctgggattacaggcgtgagccaccacacctggccccggcacgtatcttttaaggaatgacaccagttcctggcttctgaccaaagaaaaaatgtcacaggagactttgaagaggcagacaggagggtggtggcagcaacactgcagctgcttctggatgctgctggggtgctctccggagcgggtgtgaacagcgcacttcaacatgagcaggcgcctggctccggtgtgtcctcacttcagtggtgcacctggatggtggaagccagcctttggggcaggaaaccagctcagagaggctacccagctcagctgctggcaggagccaggtatttacagccataatgtgtgtaaagaaaaaacacgttctacaagaaactctcctacccgctcgggagactggggctccttgcttgggatgagcttcactcaacgtggagatggtggtggactggtacctgaaaagcgggccttgcagggccaagtgaggtcctcaggtcctaacccagtggccctctgaaagggggtgtgcaggcgaggggagcaggaggcttctctctagtccctttggaggctttggctgagagaagagtgagcagggagctgggaatggtccaggcaggaagggagctgaagtgattcggggctaatgcctcagatcgatgtatttctctccctaaaagtgggtagaggagaagaggggaacacggagacggtgctgagttgaaggtgtgagcaccgagaggaaggagagatggaagcagaagccgatgaatttggtgggcagcgttggggaggaagctaggatgggcatggcaggccagggaaggagggcggcccccgtctgactgcactggtgaaatggccacacccagagccacgggcattggtcaggaaaaggtgatgggacagggtctttctcagtcttcctccaagctccctcagccacttgcttggccctgccatctgtgagtagtgttaagaaggcaagatggggcctgctccctatctctgacaaagagggatgaaggatagagagaaccgttagtccctactgcccccggtccctgaggatgtggcaggctctggccacaggaaccgcctcctacctggtctcccggagccctcttgtcaccgctgctgccctgcaggaggcccatctcttctgggagcttatctgacttaacttcaactacaagttcgctcttacgagacgggggcagcgtgctgggaggagggagggaggtgagaggttggtatctcagggccacaggaagagaagggcccgctgtgaaggatgtggaatggatgagggctccttgctccagggccagcccagggcagggaagcaggtcatgagaccatgtggctgatggaagctgggcagtgggtagtggagcaggcagcaccctgacccagggccccactcctgctgtcaaggggcaggcgggcgctgggcaggcagcaggctgggtggcaaaacgggcgggggcggaggggccggtgttgggcttacatctcctgcttccctgagcgcctgcacggcagcttgcccttcttatagaggaaatagaggacagcgcccagcaccgccaggaccaggatgcacacaatcacagccacgatgaccacgccccggctctccggctccggcagctttctctctgcgccacaaagacactcctcgtcactccctgccccaggccacttcgtcaccatcgttgccccagccagtccagggccgacaagatggggctgctactcacctttctggacagggctctctggggagggacagggcagaaaggatgccctggcacagccctgttctcttgccaggcctggcttacctgtggaggtgctgttggctctggtatgaggactggcagtggaagtgctgaggccagtggttgtgttggagtctggtgtgagggtggttaaattgactaggaggcagagggaggggtgttaggagaagcgcaagttactgcccgtgcctgggcctgcccctgccatcccctgcagggatgcagccctcacccagctccaggaagaggatgctggtgtttttgcccaggtcgttggaggccgtgcattcaacacctgtctccaacagctccggggtcacgaggacattcagggtgctcaggactcgctgtggatcttggtcttgttcacttgcctgcgaggaaaggaaggaggcagctcaggggatggggaggatctctggtcctggccacaaagcgcaggcagggattaggagagtgtggcagatgagacacccgctcaccgtgccgttgacgttccaggagatggtgggccgggggtgccctgacgcttcacaagacagattcaacaccatattctctttcacccacaccttcctctccttgaatgccatccaaggggggccttggggaggtagggagaggtgaggtggcaagcccagctagcctgcctccccctccgcaccagagctccccagggcagcaggtggctttttgtcaaagagcttaaaaaccaccccacttggggtgacctggtctctacccagagggagggcctcaccaaaaatggccacgttgaccagctgtgtgcggttcaggccgggtatgctgggcacagacgccacgcagcgatagccgcctcctgcctcccgtttcaggtcatgcaactgaagcacaggccccctttccagcacctggcctgtctgggatgagag

SEQ ID NO: 1659 - DNA, 2668 bp, Homo sapiens
caatgtatgatttctgggacaattaagctttatttttcatatatatatatattttcatatatatatatacatacatatataaaggaaacaatttgcaaatttacacacctgacaaaaccatatatacacacatatgtatgcatacacacagacagacacacacacccgaagctctagccaggcccgttttccatccctaagtaccattctctcatttgggcccttctagggttggggccctgagcttggtttgtagaagtttggtgctaatataaccatagctttaatccccatgaaggacagtgtagacctcatctttgtctgctccccgctgcctttcagttttacgtgatccatcaagagggctatgggagccaagtgaacacggcggattgaggctaattcacctgaactcaaaaacagtgcccagcttcctcaccgcaggcacgcatcttttctttttttttcctcgagacggagtctcgctgtgttgcccaggctggagtgcagtggcacggtctcggctcactgcaagctccacctcctggattcataccattctcctgcttcagccttccgagtagctgggactataggtgccaaccactacgcctagctaatttttttttgtatttttagtagagacagggtttcaccgtgttagccaggatggtctcgtcctgactttgtgatccgcccgcctcggcctcccaaagtgctgggattacaggcgtgagccaccacacctggccccggcacgtatcttttaaggaatgacaccagttcctggcttctgaccaaagaaaaaatgtcacaggagactttgaagaggcagacaggagggtggtggcagcaacactgcagctgcttctggatgctgctggggtgctctccggagcgggtgtgaacagcgcacttcaacatgagcaggcgcctggctccggtgtgtcctcacttcagtggtgcacctggatggtggaagccagcctttggggcaggaaaccagctcagagaggctacccagctcagctgctggcaggagccaggtatttacagccataatgtgtgtaaagaaaaaacacgttctacaagaaactctcctacccgctcgggagactggggctccttgcttgggatgagcttcactcaacgtggagatggtggtggactggtccctgaaaagcgggccttgcagggccaagtgaggtcctcaggtcctaacccagtggccctctgaaagggggtgtgcaggcgaggggagcaggaggcttctctctagtccctttggaggctttggctgagagaagagtgagcagggagctgggaatggtccaggcagggaagggagctgaagtgattcggggctaatgcctcagatcgatgtatttctctccctaaaagtgggtagaggagaagaggggaacacggagacggtgctgagttgaaggtgtgagcaccgagaggaaggagagatggaagcagaagccgatgaatttggtgggcagcgttggggaggaagctaggatgggcatggcaggccagggaaggagggcggcccccgtctgactgcactggtgaaatggccacacccagagccacgggcattggtcaggaaaaggtgatgggacagggtctttctcagtcttcctccaagctccctcagccacttgcttggccctgccatctgtgagtagtgttaagaaggcaagatggggcctgctccctatctctgacaaagagggatgaaggatagagagaaccgttagtccctactgcccccggtccctgaggatgtggcaggctctggccacaggaaccgcctcctacctggtctcccggagccctcttgtcaccgctgctgccctgcaggaggcccatctcttctgggagcttatctgacttaacttcaactacaagttcgctcttacgagacgggggcagcgtgctgggaggagggagggaggtgagaggttggtatctcagggccacaggaagagaagggcccgctgtgaaggatgtggaatggatgagggctccttgctccagggccagcccagggcagggaagcaggtcatgagaccatgtggctgatggaagctgggcagtgggtagtggagcaggcagcaccctgacccagggccccactcctgctgtcaaggggcaggcgggcgctgggcaggcagcaggctgggtggcaaaacgggcgggggcggaggggccggtgttgggcttacatctcctgcttccctgagcgcctgcacggcagcttgcccttcttatagaggaaatagaggacagcgcccagcaccgccaggaccaggatgcacacaatcacagccacgatgaccacgccccggctctccggctccggcagctttctctctgcgccacaaagacactcctcgtcactccctgccccaggccacttcgtcaccatcgttgccccagccagtccagggccgacaagatggggctgctactcacctttctggacagggctctctggggagggacagggcagaaaggatgccctggcacagccctgttctcttgccaggcctggcttacctgtggaggtgctgttggctctggtatgaggactggcagtggaagtgctgaggccagtggttgtgttggagtctggtgtgagggtggttaaattgactag

SEQ ID NO: 1660 - DNA, 863 bp, Homo sapiens; identical to SEQ ID NO: 1655

SEQ ID NO: 1661 - DNA, 9151 bp, Homo sapiens
ttccggctctttctcctgcagcaagacttttatttaggtgtcgggactgctctgccacagctgcccacctggggcgcgtccctgctggccgccccgtcacggcccgaaccagctggggatgccgccccgccgcgggtcgctgctctgccacagctgcccacctggggcgcgtccctgctggccaccccgtcacagcccgaaccagctggggacgccgccccgccgcgggtcgctgctctgcctctgctgcctctcctcctcgagcatgctgtagaggtcgtcggcagtgctgccttcagggctctcgtctttctcgggaaacagatctgggaacgtgaaggtctgtccatgggcctaagggggagaacaaaggctccagccagagctgcaaagactcctcagcagaggggtctgtgggggagcctcatgctttctggcagcccctttctgccggcgccggattcaactgctcagaggtacctccctgggcctcctggggcagcgtccctgcctggaatgtaagcacccccacggccaccggcccccggctgtcacgctgcagcagaggccacagctccaggacagggccgctttccccaccattgtctctttagggcctggtgtctgcccccgccctgggtgcacccatttactagcacggggccacctggttggtggggggcagaaacaaggcatggaaaaacatgacacaaatcacgtctggtaccatgctgaacctgtccatccaaaatgcctcaggctctactcacattaaagctccccctcctcccagcccagagcctggcaattaaagtgaacatcacgtacgaagaaacatgcacgtgcggcagctgataaatcaggaccggctctgccaattaactggtcttacatcttctgctgagagttcagaatatgtccgtgtcagccaagccccagcccaggccacagcatgtggctcgggttcacgagaaggaggggatactgctccttggggacctaagcaaatacaagaagccatcttaacttgctaatgattactaagtgctccaaagctaagaggcagaaagagcagaccagaggagagggaagagaagagggaggaggagtgaggatggcacccgaatctggaaccctttagtgagtaaaatcagtcaggtacacttggctcttgcagaccctttgtgtgtaaataaatctggatgtgggcaggcagccaagtatgatctgaaacaggcccagatcccaccctgcgagggaggtgtatgcaccctgatccctggcgcagagcgcaggggctggcggggagagtggcactgcgtgcgccgtagccggcctgcaggaggattgccttacacagctctgaactttgcgtcttttaaaataccaaggggcagtcgtttacacgtgaggctgactgcccagaatgggagattcaccttgactatatggaggtgattctgctagttttccgaggcaaggggaacccaaaatgacagtttaaagcacaaacatggccatttgtcacagcttcgggaagaaatggggaaaggtgctgagagaaaatccgtttcttacaggagacaaacaccgtttggggatgccaagcatggtttcccaggggcttcccctttctagaagagttcaccttgtacctaaaaaaaaaaagcccttgatccttccaaaaaggagagagacagctgatcggggtaaagaacaggaatggagaaaaatgtcccaatgacaagtaaacaaggcagccctgccttcaggaatcccagggcgccctgggggctgccgcctgcctggacctggaggccggagccccgagcacggagctcggcccagctggcggcagcggtttgttctggagttgcctctcatgtcgtgcgcccttcattcctgcgcgcccttcattcctgcgctgctcagcatccacacaagcctcggggcagcgggcagtcaatggtctttttgttgtgtgggtcactgaggcgctgctttcagctcccaggactttgggccaaggagatgcttatcaggttgtcggagaaagaaatgtgggactcccgccacgtgggacagggcctttccacagcggccaactccaaataacgtggataattttatctttccaatgctccctccctgggctttgcaattagcagtgattctaagccctggcgcagggcccagggggacacgctgagcaaggtctcagcagacacgagacaggaaagggccttgagagtcccctctgcgggcagacagggaccaacggccacggcccatttctaggctgtgcaaagatgtgctggagttcaggaaggggggtgaggacccgttacaaattttcattctggaacaggaggatccatgcccaactgggacccttcaggctcccagttgccctgccctgtctctggctgcctggacttcacagagggagaacaacacgcgggcggcagctgcagacaccggatcccggagctgctgggttcagttttcatgggaggtggggcccagaggaagaacgcaagggctcggatgacttgaatgccacttgtaaccgtagctgcctctgaagtgcccgtggcggtgccggcacacgggatgtccacccacatgccatgacaaagacagatgggcccgactgacactgagcacacagaggcctttatgaggccaacggctgctctccccacctggattggctgatttcatgcacagcaaatatcaggccaaattattccgggggcccctgtttagaacaacaaatgtgactgtttttcagaaaagctgccatgctaacttggcctttttcacaaactgcctccttagccccacaacaggccggctggcccaggaggcggtttccaccatcgtgtgactgccatctagtggcagggcccgccggctcggcctccagggaccatttacaccggaacacaaccccatccccacccagtaaggccagccccaggggcagagtggggaggcccaggaggtggccggggcaggctgtggacatcttggcccagagagaaagtgcctctgggtttgcctgggactcaaaatgaagagcccaaagaaaggctttgaaactgtgggtctcactcctgacaagtctgggtttcagaaactgaaggcccaggcaacgtggggtgagggttcttcctccccagagccccccaggatacgtaagaaagcacctgctcagaagcagcctgctgagccctaacaagtacgtgggacctgctaccctgcaatgcaggacatgggcctcagccaacagcctggccagccagacctgccttggcaccaaagacctttgccctcaggggcctcacactctgcctccgaggctgaaacccagccaaggacaggctctccagaggccggggcctcccatgctctgacaccctggtgtgcgttggagttgaaacccactaggcctgtgatggctgcctttgcccacagagaattcaaacttcaaaatcacaaaacggccggacgctgagacgtgccccatgtgccccagtgctcacgtgctcccagcgccaccactaacacccccaaggccgtgacggagcatgaccttatgtggagcctgcctctgcgctgaggccctgagatccggcctcacgggggctccctgggccccagcgcagcgtctccggcacaaacatccccaaggacacagttgcgaggagcccctcggaggccccgctggggctggccagctcacacgcaccagctgcacgtaggcgaccttgtagtccggcttcttgatcctcacgtttctgtgatctcttctcttgttagagcctgccggaagggagtgaaaaaaaaatcagaactttaaaaaaatcagaactttaaaaaattacatcctcagaggtcaatgccactaaaacgaacctctgctctcttaaaaatgtaaatatgtttttaaaaactcaaaaaggcgatttctcagggaaatgggcactgtaatcaaacgagccagcacagcaggctcccaggctcctcccttctcccaacagaggccagcaggttctcaacaaaggagcggacgtggcaccagccagggcacacgacaggggcttatggaacagacagcgctttgctccccagcctcagccactgcagtcccacctcgggggctgacggcaggagtcagggctcagaatggaccccgggccagcccagttgaattccaatccctgctctggcacgtaagcaccgtgtgaccctgacaagtcaccctgtgcctcagtttcccatgagccacgtcagaccaagacccccatgcagtagctgaggctgtggctcggcgaggtgggcatgtggcacagatgggcacgacaccaacaggagaacctcccatgggcactcaccatgctgcacccgtgtccgcacagcagccacgggcacgttatagatgccctcgaggtaattcctgaggtccacccttgtcattctggaggcgaaggagaaagaaaacggcatcttaaccaggctaaaagccaaaaatactgtcccagatgcacaagcacccgaggctgagaggccgacagaccaagacccacagggggcagggaggagggctgggtacatcagcggcactagtggggccaggcagccccagcaacaccagtgctgctggctgcaagactccctactctgggcacaccagcatggggtggcagtggcacagaccccacagagtgggagcactgcccaaccaacccctggcctgctccacagccccacatggctccctgctccgggcaagtgcctgtgagaggaggtgacagtctctgcacgctcctggctggcaggtgccccacctcgtctgccccggggcccagtggccgcatcagggttaggcctgctctgcggctgatgggactgatgaggttctaggaagtaccttctggaaaggcctgcctggcattcggtgcgttaactgcaagttccctctactgcagaacctcacggtcactgtcaactcagcttctgggcccctgcaggctgcacaggcctgaccttcgcccccaggggagctcacgctgctgccccgcctggctcgcgtcaaccctgagctggggacctgtgaacttaaacactgcagagcagcaccccagttttgctcgtagggactgtgcatttctctgaaggtcaagcaggctcttctgagcggttctgtacatcacggcctgctcccaacccagcctctcagggcgcctctcctaaaaagaagctgcaagaactcaacagaagacgcgagcacagaggtccaaattttaaggcttccagtgaagccgtccccgggtggagggcggcgtgcagcctgcctgccgggctccacacctacagggactccatcaatacttgccgggcagggccgcctgaggtgccttcccagcaggaagaggctagcacgtgagcagagttgttttaactcaggacccaggcccccctgagggcactctcccaacccagcgggaaaacttccgggctcactccacggggatccccccgagggtgctccccaaccccagccggaatcctcccggactcactccatggggatccggaactgcacggtgtcctcgggctgggccacaccgggccgcaccagctgaatgaagaagttggttcggaacacccgaagttgtgggccacccagccggtacagggggtacctgtacagaagagattgggtccatgtcacacacttaggccaaggcagcccgacacaccaaccctgcagacctccgagtgtccactcacaacagggtgggcagaaaagggggtagctaacactgcggatccctgagtgtccactcccaacagtggtgggcgggaaacagggtagctaaccctgcagacccccgcgtgtccactcacaacaggggtgggcgggaaacggggtagctatcagcaggtcaccacccaaggacacagaggtccccacagcccctttctcacatgggcctgccaaggtggacggccagtccctagcatcgacttaaggagcatgcgctgttgacccccaaggtcagactttagaaaaggccaatggacaaaaatcagaaccccgcagacagcattcccccaataagctgatggcaaggctcaaagacgtgtgttggggcactgatacccctgggagagcagaccccacgcggccggcccactctcctgctgctcgggtgaagtggagctgcagagaaccacacaccatgggacagaaaaggccagctccgcactctcccggtggcagcagggcctagctcctcggtatggagaacgcaggctaaccaggcttaggctcctggaagacggtgctgccaagactctgattcagtacactaaatgtgagttgagtgcaccacaccccagcactccactaaaagccagcagaggcagatggagaggtgccaagtggccaccgcaaactagaccagcacgctgcctgggctggggggccaggtgacgatcgtgcagaatctctagccagttggtttcgtgcattctcccacgttcagctgggtggacaggcagcaccgtcctaccgtcccccacccccgttcccgcccctgccactgccggcacaccctggctctatctgggcctcagagctggggggaggaggggcacaggagaaactcaggcctgctgggtctcgggggatgtggggtctgagagcctaggtgcaggtcttggtggacggggagcacaggggctcttgaggggtctctggtggccttatctgaggcactgcacatggccctggccttgggagcacccagcaccaagttaagaggggctccgtgaggccaacgctgccccaggcttcacatgaatttcacgctggcctctgcctgtctagggaagatgaggaggaagtgagggtcagaggccttgggtggggtgttcctgaagggccaacagtggtaggcagcactgagcctctgggcccgagggcctggcaggggccaggagctgctgggacctctcagaggcaaggcgcctgtaacaaagcccgatcactaatcatgtccaccccaggcctcctgatgaccacactgacacatggcagcctggtggccgggccagtggggctgagtcttcactcacccaaccccagcagagcctcctcttgggcatggccttggcctttccaagcctcagagtgcagccttcaggggtgggccccagtgagaggccgagaagaaagggtgggctctggaggtggaggggcctgacttgttttacccacaggttcaggctagccatggccacccgaggggctcacacattccctctggtgaccagctgtgggactgcaggagtggagacaaagtttggggactcccagtaaacagtagaaaagagggttcaacagctcccaggccattaattttcgagtctccaggcttggggcctgaagggcacactttgctaagggtctgaagggccatgtgtgggcttgagatgagaggctggcaggggttgggccaggacgattcactgtccttgttcccacaggccgagcctctccaggctggagcgccagctgcctgtgcatggagcctgcagatctggaacaatctgcactgtcgacacccagggccccaggacagggctctaaggcctctcttttgttctcgaacccttgtgggcccaccagccctcagttccctcagtcccactctccccagggagcaccccaagcactccgcatgggatttcacaagcacctccacggtaacctatctcaagtagaactctgcactaacttcttcctcaaaacacaaaaacttggctcactgccaccagcctgcctccccacggccccacgagtgactcacccaggatcccaccctctcggcacccccaccccagctgcatccagtccacagcaagtccagtcagcgctccctgcaaaggctccctggcaacaggagtgtgtgcactgctgggcgagcgggccccgctgcctccaaggcaaccacacctgatccgtttccaggggcccaccacccttggcccttcaggaacaccccacccgggtcctctgaccctcacttcctcctcattctccagggacaggcgaagggccagcgtggaattcacgtgaggctcagggcagtgttggcctcactcagaccttttcttccttggtgctgggtgttccccaaggtcagggccacgcgcagcaccggtcccaggtgtctgctgaaggaagcctcctccactgggggtcccacctgccaccctcccctctctccccagctatgtgcaggggcctccaaagccacaccctggccccttgaccgtccctctccagaaacactgattactgttctccaaaacccacccgggagcccacatctactgattacgcctgagtcattcgttcaccaagaaatatgcagggcttcctgcttcaatttggggagggcgaagtggtgcaggacagcgccccgatggccccctgggaatccagagaacatgcagagtgggcgtggggggtctgggctgagcagaaccgggcctcccgccctgcctgccccaaagccctgagggctgcggtcagctgccctttcccactcaaacccaatctggattcccagctcctctgcctcaggccgcgcccgcgctgcggtgggggccgcccgggcctccccgcctggacccaacagccgacgtggcccccgccccgtgacgatcagaaacgtctccaaacagctccctcggccctggctgcgggaccagccccgggcctgaccccgggccaccctcccactccccacgcgggggcaccgtggcctccatgggtttggctcggaccctctgtccccagcccggccacgcccgccccctggggttgccctaaacctggcggggggctcctccgccacccgcctcgcgtgtctcaaggcatgacagggggtcccggagaaccctgcctcgcccgggccaggaggcggcccagggacgcccaccccgctccccggagtccgcgcgccctgtggggtccgtctgcttgtgacactaaggggcgccccgcgacgggggggtgacgacccctactcacaccacattccgcgccatggcggccacgcgcgcttccggg

SEQ ID NO: 1662 - DNA, 9273 bp, Homo sapiens
ttccggctctttctcctgcagcaagacttttatttaggtgtcgggactgctctgccacagctgcccacctggggcgcgtccctgctggccgccccgtcacggcccgaaccagctggggatgccgccccgccgcgggtcgctgctctgccacagctgcccacctgggggcgcgtccctgctggccaccccgtcacagcccgaaccagctggggacgccgccccgccgcgggtcgctgctctgcctctgctgcctctcctcctcgagcatgctgtagaggtcgtcggcagcgctgccttcagggctctcgtctttctcgggaaacagatctgggaacgtgaaggtctgtccatgggcctaagggggagaacaaaggctccagccagagctgcaaagactcctcagcagaggggtctgtgggggagcctcatgctttctggcagcccctttctgccggcgccggattcaactgctcagaggtacctccctgggcctcctggggcagcgtccctgcctggaatgtaagcacccccacggccaccggcccccggctgtcacgctgcagcagaggccacagctccaggacagggccgctttccccaccattgtctctttagggcctggtgtctgcccccgccctgggtgcacccatttactagcacggggccacctggttggtggggggcagaaacaaggcatggaaaaacatgacacaaatcacgtctggtaccatgctgaacctgtccatccaaaatgcctcaggctctactcacattaaagctccccctcctcccagcccagagcctggcaattaaagtgaacatcacgtacgaagaaacatgcacgtgcggcagttgataaatcaggaccggctctgccaattaactggtcttacatcttctgctgagagttcagaatatgtccgtgtcagccaagccccagcccaggccacagcatgtggctcgggttcacgagaaggaggggatactgctccttggggacctaagcaaatacaagaagccatcttaacttgctaatgattactaagtgctccaaagctaagaggcagaaagagcagaccagaggagagggaagagaagagggaggaggagtgaggatggcacccgaatctggaaccctttagtgagtaaaatcagtcaggtacacttggctcttgcagaccctttgtgtgtaaataaatctggatgtgggcaggcagccaagtatgatctgaaacaggcccagatcccaccctgcgagggaggtgtatgcaccctgatccctggcgcagagcgcaggggctggcggggagagtggcactgcgtgcgccgtagccggcctgcaggaggattgccttacacagctctgaactttgcgtcttttaaaataccaaggggcagtcgtttacacgtgaggctgactgcccagaatgggagattcaccttgactatatggaggtgattctgctagttttccgaggcaaggggaacccaaaatgacagtttaaagcacaaacatggccatttgtcacagcttcgggaagaaatggggaaaggtgctgagagaaaatccgtttcttacaggagacaaacaccgtttggggatgccaagcatggtttcccaggggcttcccctttctagaagagttcaccttgtacctaaaaaaaaaaagcccttgatccttccaaaaaggagagagacagctgatcggggtaaagaacaggaatggagaaaaatgtcccaatgacaagtaaacaaggcagccctgccttcaggaatcccagggcgccctgggggctgccgcctgcctggacctggaggccggagccccgagcacggagctcggcccagctggcggcagcggtttgttctggagttgcctctcatgtcgtgcgcccttcattcctgcgcgcccttcattcccgcgctgctcagcatccacacaagcctcggggcagcgggcagtcaatggtctttttgttgtgtgggtcactgaggcgctgctttcagctcccaggactttgggccaaggagatgcttatcaggttgtcggagaaagaaatgtgggactcccgccacgtgggacagggcctttccacagcggccaactccaaataacgtggataattttacctttccaatgctccctccctgggctttgcaattagcagtgattctaagccctggcgcagggcccagggggacacgctgagcaaggtctcagcagacacgagacaggaaagggccttgagagtcccctctgcgggcagacagggaccaacggccacggcccatttctaggctgtgcaaagatgtgctggagttcaggaaggggggtgaggacccgttacaaattttcattctggaacaggaggatccatgcccaactgggacccttcaggctcccagttgccctgccctgtctctggctgcctggacttcacagagggagaacaacacgcgggcagcagctgcagacaccggatcccggagctgctgggttcagttttcatgggaggtggggcccagaggaagaacgcaagggctcggatgacttgaatgccacttgtagccgtagctgcttttgaagtgcccgtggcggtgccggcacacgggatgtccacccacatgccatgacaaagacagatgggcccgactgacactgagcacacagaggcctttatgaggccaacggctgctctccccacctggattggctgatttcatgcacagcaaatatcaggccaaattattccgggggcccctgtttagaacaacaaatgtgactgtttttcagaaaagctgccatgctaacttggcctttttcacaaactgcctccttagccccacaacaggccggctggcccaggaggcggtttccaccatcgtgtgactgccatctagtggcagggcccgccggctcggcctccagggaccatttacaccggaagacaaccccatccccacccagtaaggccagccccaggggcagagtggggaggcccaggaggcggccggggcaggctgtggacatcttggcccagagagaaagtgcctctgggtttgcctgggactcaaaatgaagagcccaaagaaaggctttgaaactgtgggtctcactcctgacaagtctgggtttcagaaactgaaggcccaggcaacgtggggtgagggttcttcctccccagagccccccaggatacgtaagaaagcacctgctcagaagcagcctgctgagccctaacaagtacgtgggacctgctaccctgcaatgcaggacatgggcctcagccaacagcccggccagccagacctgccttggcaccaaagacctttgccctcaggggcctcacactctgcctccgaggctgaaacccagccaaggacaggctctccagaggccggggcctcccatgctctgacaccctggtgtgcgttggagttgaaacccactaggcctgtgatggctgcctttgcccacagagaattcaaacttcaaaatcacaaaacggccggacgctgagacgtgccccatgtgccccagtgctcacgtgctcccagcgccaccactaacacccccaaggccgtgacggagcatgaccttatgtggagcctgcctctgcgctgaggccctgagatccggcctcacgggggctccctgggccccagcgcagcgtctccggcacaaacatccccaaggacacagttgcgaggagcccctcggaggccccgctggggctggccagctcacacgcaccagctgcacgtaggcgaccttgtagtccggcttcttgatcctcacgtttctgtgatctcttctcttgttagagcctgccggaagggagtgaaaaaaaaatcagaactttaaaaaaatcagaactttaaaaaattacatcctcagaggtcaatgccactaaaacgaacctctgctctcttaaaaatgtaaatatgtttttaaaaactcaaaaaggcgatttctcagggaaatgggcactgtaatcaaacgagccagcacagcaggctcccaggctcctcccttctcccaacagaggccagcaggttctcaacaaaggagcggacgtggcaccagccagggcacacgacaggggcttatggaacagacagcgctttgctccccagcctcagccactgcagtcccacctcgggggctgacggcaggagtcagggctcagaatggaccccgggccagcccagttgaattccaatccctgctctggcacgtaagcaccgtgtgaccctgacaagtcaccctgtgcctcagtttcccatgagccacgtcagaccaagacccccatgcagtagctgaggctgtggctcggcgaggtgggcatgtggcacagatgggcacgacaccaacaggagaacctcccatgggcactcaccatgctgcacccgtgtccgcacagcagccacgggcacgttatagatgccctcgaggtaattcctgaggtccacccttgtcattctggaggcgaaggagaaagaaaacggcatcttaaccaggctaaaagccaaaaatactgtcccagatgcacaagcacccgaggctgagaggccgacagaccaagacccacagggggcagggaggagggctgggtacatcagcggcactagtgaggccaggcagccccagcaacaccagtgctgctggctgcaagactccctactctgggcacaccagcatggggtggcagtggcacagaccccacagagtgggagcactgcccaaccaacccctggcctgctccacagccccacatggctccctgctccgggcaagtgcctgtgagaggaggtgacagtctctgcacgctcctggctggcaggtgccccacctcgtctgccccggggcccagtggccgcatcagggttaggcctgctctgcggctgatgggactgatgcggttctaggaagtaccttctggaaaggcctgcctggcattcggtgcgttaactgcagagttccctctactgcagaacctcacggtcactgtcaactcagcttctgggcccctgcaggctgcacaggcctgaccttcgcccccaggggagctcacgctgctgccccgcctggctcgcatcaaccctgagctggggacctgtgaacttaaacactgcagagcagcaccccagttttgctcgtagggactgtgcatttctctgaaggtcaagcaggctcttctgagcggttctgtacatcacggcctgctcccaacccagcctctcagggcgcctctcctaaaaagaagctgcaagaactcaacagaagacgcgagcacagaggtccaaattttaaggcttccagtgaagccgtccccgggtggagggcggcgtgcagcctgcctgccgggctccacacctacaggcactccatcaatacttgccgggcagggccgcctgaggtgccttcccagcaggaagaggctagcacgtgagcagagttgttttaactcaggacccaggcccccctgagggcactctcccaacccagcgggaaaacttccgggctcactccacggggatccccccgagggtgctccccaaccccagccggaatcctcccggactcactccatggggatccggaactgcacggtgtcctcgggctgggccacaccgggccgcaccagctgaatgaagaagttggttcggaacacccgaagttgtgggccacccagccggtacagggggtacctgtacagaagagattgggtccatgtcacacacttaggccaaggcagcccgacacaccaaccctgcagacctccgagtgtccactcacaacagggtgggcagaaaagggggtagctaacactgcggatccctgagtgtccactcccaacagtggtgggcgggaaacggggtagctaaccctgcagacccccgcgtgtccactcccaacagtggtgggcgggaaacagggtagctaaccctgcagacccccgcgtgtccactcacaacaggggtgggcgggaaacagggtagctaaccctgcagacccccgcgtgtccactcacaacaggggtgggcgggaaacggggtagctatcagcaggtcaccacccaaggacacagaggtccccacagcccctttctcacatgggcctgccaaggtggacggccagtccctagcatcgacttaaggagcatgcgctgttgacccccaaggtcagactttagaaaaggccaatggacaaaaatcagaaccccgcagacagcattcccccaataagctgatggcaaggctcaaagacgtgtgttggggcactgatacccctgggagagcagaccccacgcggccggcccactctcctgctgctcgggtgaagtggagctgcagagaaccacacaccatgggacagaaaaggccagctccgcactctcccggtggcagcagggcctagctcctcggtatggagaacgcaggctaaccaggcttaggctcctggaagacggtgctgccaagactctgattcagtacactaaatgtgagttgagtgcaccacaccccagcactccactaaaagccagcagaggcagatggagaggtgccaagtggccaccgcaaactagaccagcacgctgcctgggctggggggccaggtgacgatcgtgcagaatctctagccagttggtttcgtgcattctcccacgttcagctgggtggacaggcagcaccgtcctaccgtcccccacccccgttcccgcccctgccactgccggcacaccctggctctatctgggcctcagagctggggggaggaggggcacaggagaaactcaggcctgctgggtctcgggggatgtggggtctgagagcctaggtgcaggtcttggtggacggggagcacaggggctcttgaggggtctctggtggccttatctgaggcactgcacatggccctggccttgggagcacccagcaccaagttaagaggggctccgtgaggccaacgctgccccaggcttcacatgaatttcacgctggcctctgcctgtctagggaagatgaggaggaagtgagggtcagaggccttgggtggggtgttcctgaagggccaacagtggtaggcagcactgagcctctgggcctgagggcctggcaggggccaggagctgctgggacctctcagaggcaaggcgcctgtaacaaagcccgatcactaatcatgtccaccccaggcctcctgatgaccacactgacacatggcagcctggtggccgggccagtggggctgagtcttcactcacccaaccccagcagagcctcctcttgggcatggccttggcctttccaagcctcagagtgcagccttcaggggtgggccccagtgagaggccgagaagaaagggtgggctctggaggtggaggggcctgacttgttttacccacaggttcaggctagccatggccacccgaggggctcacacattccctctggtgaccagctgtgggactgcaggagtggagacaaagtttggggactcccagtaaacagtagaaaagagggttcaacagctcccaggccattaattttcgagtctccaggcttggggcctgaagggcacactttgctaagggtctgaagggccatgtgtgggcttgagatgagaggctggcaggggttgggccaggacgattcactgtccttgttcccacaggccgagcctctccaggctggagcgccagctgcctgtgcatggagcctgcagatctggaacaatctgcactgtcgacacccagggccccaggacagggctctaaggcctctcttttgttctcgaacccttgtgggcccaccagccctcagttccctcagtcccactctccccagggagcaccccaagcactccgcatgggatttcacaagcacctccacggtaacctatctcaagtagaactctgcactaacttcttcctcaaaacacaaaaacctggctcactgccaccagcctgcctccccacggccccacgagtgactcacccaggatcccaccctctcggcacccccaccccagctgcatccagtccacagcaagtccagtcagcgctccctgcaaaggctccctggcaacaggagtgtgtgcactgctgggcgagcgggccccgctgcctccaaggcaaccacacctgatccgtttccaggggcccaccacccttggcccttcaggaacaccccacccgggtcctctgaccctcacttcctcctcattctccagggacaggcgaagggccagcgtggaattcacgtgaggctcagggcagtgttggcctcactcagaccttttcttccttggtgctgggtgttccccaaggtcagggccacgcgcagcaccggtcccaggtgtctgctgaaggaagcctcctccactgggggtcccacctgccaccctcccctctctccccagctatgtgcaggggcctccaaagccacaccctggccccttgaccgtccctctccagaaacactgattactgttctccaaaacccacccgggagcccacatctactgattacgcctgagtcattcgttcaccaagaaatatgcagggcttcctgcttcaatttggggagggcgaagtggtgcaggacagcgccccgatggccccctgggaatccagagaacatgcagagtgggcgtggggggtctgggctgagcagaaccgggcctcccgccctgcctgccccaaagccctgagggctgcggtcagctgccctttcccactcaaacccaatctggattcccagctcctctgcctcaggccgcgcccgcgctgcggtgggggccgcccgggcctccccgcctggacccaacagccgacgtggcccccgccccgtgacgatcagaaacgtctccaaacagctccctcggccctggctgcgggaccagccccgggcctgaccccgggccaccctcccactccccacgcgggggcaccgtggcctccatgggtttggctcggaccctctgtccccagcccggccacgcccgccccctggggttgccctaaacctggcggggggctcctccgccacccgcctcgcgtgtctcaaggcatgacagggggtcccggagaaccctgcctcgcccgggccaggaggcggcccagggacgcccaccccgctccccggagtccgcgcgccctgtggggtccgtctgcttgtgacactaaggggcgccccgcgacgggggggtgacgacccctactcacaccacattccgcgccatggcggccacgcgcgcttccggggt

SEQ ID NO: 1663 - DNA, 14886 bp, Homo sapiens; identical to SEQ ID NO: 1003

SEQ ID NO: 1664 - DNA, 32681 bp, Homo sapiens; identical to SEQ ID NO: 1001

SEQ ID NO: 1665 - DNA, 13361 bp, Homo sapiens
gctttttcctgggatagcgatggagacgccgggcgcatcagcgtcgtccttgttgcttcccgccgcgtccaggcccccgaggaagcgcgaggcgggagaggctggggctgcgacgagcaagcagcgggtcctggacgaggaagagtatatcgaggtacgacctcggtgcggacgccggcgacttctgggcccatcctctgcttcaagctcctctcaggttccctctctcgggtgttgacactccgtctcctcgtggaagtggaggagccgggtgtggacggtcccacgagtcaagtaaacagggcagaggaagacgtctgtggtggaagaggctgtagtagtgttgtcagggaaaagagagagcggctctctttgtatgggacgggggtcagggaaagaagattttctgttaaagtgtgagtaggagtttgacaaactggaaggatggtggcaaagagggctttctaaagagcggtggcagcaagtgtgaatgctggggttcctggaaagagaccgcagttgtgacagcatctcgagtgagtggacctgcgtcgccccaccacacgcacacagaaggaggagctgaaacggggattggcggaagtcagtttggttttagacctgtttaattcgggacaccttttgggatatgtagatggatggctttaacggacggttgggtgcccagatatgcagctcgggagcaaggtctggctggaggtgcagacttgggaatctcaacttgtggtagtgactggctgaagttactcaggaaaaaggtttatttttattttattttttgagacggagtctcgctcgtcgtccaggctggagtgcagtggcgcgatctcggcttactgtaaccaacctctgcctcctgggttcaagccattctcctgcctcagcctgccgagtagctgtgactacaggtgcccgccaccacgcccggctaatttttgtatttttagtagtggtggggtttcaccatgttggccaggctggtctcgaactcctgacctcaggtgatccgcccgccttggcctctcaaagtgctgggattacaggcgtgagctaccatgccccgccaggagaaaggtttagattggaaatagaaagtcatgtgtggaatgaaagtgacaacacccacattggtctggcttgtggggagccagcaatggagaatgagaatgaccagttagcaagggcgagagagaagggtttcacggacttcagaagagtgtttagtaatgttagaggttgcagcatggctaccatatgggatgctcaaccccactagaaagtgccctcaagctccctcaatccagccccagtcattggggaagtagaatttgaaggaggttcagcaagttccttagcatgtacagcagtggacctgtgaggcaggagcacccagactgcagctccgactttcttttttcttttttttttttttttttgagacggtctcgctctgtcgcccaggctggagtgcaggggtgtgatcttggctcactgcaacctccgcctcccgagtttaagcgattcttctgcttcagcctcccacgtagctggaattacaggtgcctgccaccacgcccggctaatttttgtatttctagtagagactgggtttcaccatgttggccaggctggtcttgaacttctgacctcatgatccacctcccttggcctcccaaagtgttgggattacaggtgtgagccaccgcgcctggcctctgactttcattctgatctctccttgcagggcctccagacggtcatccaaagggatttctttcctgatgtggagaagctccaggcacagaaggagtacctggaagccgaggagaatggagacttggaacggatgcgccagattgccatcaagtttggctctgccttgggcaagatgtcccgggagcccccgccaccctgtatgaggaccctgtgggtggcggagaggggaaagcctgctgaactgtcgcttcaggctcactctaattcttatccccctctcttcccctagatgtgactccagccacatttgaaacccctgaggtgcatgcaggcactggagtggtgggcaacaagcccaggccccgcggccgaggcctggaggatggtgagtgagggtgccctctttaagtcacatggtcaggattgcctgggaatcttagcctgtgaggccctgagggggtggtccagagggctgcaggccacatcttgttcctgaggggtcttgcgtaaatagcagcctgtgaagtcaaaggacattggtctaggtggtagaacatctgggtccagctcccacacatggctcgcctctgtgaaatgggactctcaccagctcttgctggcttttctgctgtgttccagccctgccctgtgggcttcatggatgttggaaggccccttttgttactatcctgaagatgcctcagggcctctccatttgtttccttcatgttggtcacttcccagataactgcatggctcactgtgtttcttcctgtagatctctgcataggtgttacctgttcagagaaacttttcttgacctgccagtgtgaagtcacaacaccactggtgctctgtggcttccagcctggctttggtttttcatcacaagacattttattttatttaatttcattttatttttaattttttgacacagagtctcgctctgtcacccaggctggagtaaaatggtgtgatcccggctcactgcaacctccacctcccaggttcaagcaattctccctgccttagcctcccaaatagctgggattacaggcgcctgccaccactcctggctaatttttgtattttgtagtagagacgaggttttgccatgttgtcccggctagtcttgaactcctgacctcaggtgatctgtctgcctcggccccccaaagtgctggtattacaggtgtgagccaccgcgcctggccaagacataacgttttaaaggcatttctgtttatggtctctttccctaattggcatcccttgcacaagagcagaagctttgttttgctttcatctgtatgctccgtgttgggaacagcacatgtggtgttgtgggccttgcacagatacacatggaacagatgaaagagttgtcatcttcagcatgtttgctgggacacacagctctatatggtaacatcgtgacttgatgggggagtcggtttaggaaagggcactccgagtcctgttgaatgcaagtgttctgcacgccatgggacttctgcgttgtcaggccctcttttcatcagtagtagaatgtcagtgcatgtatagacaaacgagacactctttcttatcagtttgtagactccactgtgctggagtagcacagatgtgttgtgtgtttgcacaaacatgcaaacatgatactttttgctttacaatccagctttttcggccattaacacagtccttgttgtccttgaagcttgattatctgttgaaatgtagcttgtgcatcacagggcaatttgtagatttttttcttctccttttttttttttttcctatagagatgaggtttcattatgttgcccaggctggttttaaacttctgagctcaagtgatcctcccaccttggcctcccgaagtgctaggattacaagtgtgagccatcatgcctagccagtttgcagattttcaatacctgtacacctacatgccagtaaatataggaatccttttcagaacctaagtggtaggaaccatcatcatgtttacaggtgaggaaactgaggctcagaaaggcagtcacttctgcaggtctcagagatggtcagggtttcacttcttatctctctgagatgaatagagtttctgacccctgtcctcatcccgtgggtcttgagcttgtagccactgtgccttgtgcatagcctcacgtgtagcaggtggtcaggactgtcactagacttgaaggcagagctctccaggtggccccaccgaagtttgcaccaccacacgcagcaccagggcaccacctcagtgggagtaccactttccatggtggcagggttggtcggaggggggggtgtttggggttgtggcttagcacctgtgaggccccatccagaggactaagtcatatgagatccctggaattggggctcgctctcaggtcaggatgattaggcgatgaccacccacctgtagtacaggtaccaggaagagaagagtgggtaaggtaaggaaatcctagggagtgagggagagccccagggatttggaggcctggcacccacaggcctggcaccactttggtgggggaggagcctgcctgtgatcacgagctcttgctctaacacctgtattgctttctccagtctgaatcagaccacgtaattcccttggcatccagcacatgagcagagctggccctgaatctgtagggtaccacctgagggctctctgggcagtcagggtgggtggattctgcccccgtggggagtccttggcagtgtgggctttcatgggcagaagccaggaccaggggagaggattccagccctgcatgttgggggctatgattcctgggcctgggtgtcctcctctttcctgactgcaaagggtgctgtgttcctcctcccgcaacccctaagcaggagaggctggagaggaggaggagaaggagccgctgcccagcctagatgtcttcctgagccgctacacgagtgaggacaatgcctccttccaggagatcatggaggtggccaaggagagaagccgggcacgccacgcttggctctaccaggctgaggaagagtttgagaaggtgtctctggggtctggggtgtcacataggcgtaggcaccctctgtggtggttggggagccccagggccatgggtacaatgcccaggggcatctctgaccatcacttttccccatgtgattgcagaggcagaaagataatctcgaactcccgtcagcagagcaccaggccatcgagagcagccaggccagtgtggagacctggaagtacaaggccaagaattccctcatgtactatccagagggtaagtggcgggcctcgcagccaaatggggaggtgttgggtagagctgtgtgtgtctggctgtgtttggagcagccttccaggtgtgtatggccgtgcccccttgcagtttgggcttctgatgggtactggtctgtctaagggtggacaggtctgtgtgaggtcagcagtgagtgagaccctctccagcggcactggggcctgcgttctgctcaatgcttttgttcatctgggagtgacttggccgagaagcgagctcctcatgctccttaggctgctgcccttctgacacctgctgctacctttgcttcgtctgccaggtgtccctgacgaggagcagctgtttaagaagccccggcaggtggtacataagaacacgcgcttccttagggaccccttcagccaagccctgagcaggtgccagctccagcaggcagccgccctcaatgcccaggtgagcaggcgggtcagcagggccgcatgggccaggttggacagggctgcctgggggcaggcatgatctctcccatctctttgagcttggcagagctcagtgagtggaaccatctggggccctgtgcggcaggatcctgagtctttccttggccccagtgggcttccattgaacactgccttggtcacacacgttctgtaggtccagatctgtgccagctcccttgatggcaggggcaggagagaaaagggactgctgggagtgagcccaggctggcagctgcacgcccacacaccgggcagggaagccagagagccgcagagggagcccagccccagggggtggctggggtgggacaggccctgggttggcagagagcagaggctttctgagtctgggagcaagacgagtagatactctctgatggtgactgtggcagtcacagggttgaagtggggaaggcaggaagagactagagcataagcattgcctgtcatcagcattgcctgtcatcagcattgccccctgcaggggcctggcgtcagcatcctctggagttgctgggataggcgcagctcgagtggaggccctggcacctccctggatgggaggagggggctttccttgcttgggtacccactttgacaggccctcaaggtcttttggggggttggggcaggggccctccctctctttctccaagaaggctgccaaccccagagccccagccttgccctgaggagaggaagtgtttccagcatgttcccacgtgtttgcccaccggccagctgtcgagcgtgggctgcggtccccctgatgccagcctctctgcttgttccagcacaaacagggcaaggtgggccccgatggcaaggagctgatcccccaggagtcccctcgagtgggtggatttggatttgttgccactccttcccctgcccctggtgagaaaagtgcccactggcaagtgggtctactgctgggactccctgggggaggtgggcttctcagtcggccctggccactcctggcctctacctggcctgccccacaccttgtgtaactcagggacctggtctcctgtctgtacaaggccctagaggccaggtgtccaggctgcttggggccgtgggtgggctggactctcaggcagacctggcctgagacatcctgggatgacgtgtcctgtcctggtccttactgtgatgtcagtgggtgggggtgtgtgcacagtgcttatgagtctaagtctacctagcactgcagggagggaggcccagcacctcagtggaggtgaaactcaggtggtcttgtggcatgcgtgggtgtccctctgcactctggcctctgtgctcttgggtgctggtgctgtgtcacacgccagggcatgtgaaggcaccacaggtttgcctggggttctaggaggtttgggagccctggaaggcctgagtgtctcctcctgcgtggctgggggagacctcccagaggcttgtaggctaagcacatggctgtagggccttgagcctgcctcgggcctgctgggagcttggcatttccctttcggaggatggaggtgccagggttccagagtcctggggaaggagagagggctagctgcctgccttcgtattagctgggatgcacattgggtgaacaagctgtgactggaggggagggtggtggggagtcctctggcctgaggtggttttgggctctttgtctgcaggtgtgaacgagtccccgatgatgacctggggggaggttgagaacacacccttgagagttgaagggtcggaaacgccctacgtggacaggacacccggcccagcttttaaggtgggttgtggtgatgggggaactgtgtgcgaccggggtggacacctctggagccctgagtgcctgtggctcaggactgagcactgggatcggcccccagctgctgacgggcagagtgctggcttttctgaatgccagggtgctgaaggcaggtgtgggtgggtggacctgtcacagagggatttgggggtgtaagggctgagacaccaaggcagggagtggcttgggccctctggatcctggaggccgggtgctgttcatgaatgaggcaggatggtcacagacacgtgaggagctctgcaggcctgagggccataggacgaggctgtgtgcttgtagagaaggcccctggttacagaacacgattgggacacgctggattacacggctcaagcctggtgttgtaggagtggtcagggtggagtgtgtgaggcccggcacagaccaggggaggctcttcgtgggctgggtcagatacaacaggcctccccataccactgcgggcctttccccagaatacttagtacaggtaacccatgtccagacaaaacatggggagaggttctggttaccttggttctaaattgtctgggacacaaggataaccaaggcaaacgtgcgagagggataatgaagaggatgccgtgctgtccaatgtgagagcgcaaggcaagggctgaggtgcttctgaggtatgcctgccactgcttcccgagtctccaggccaacagtaaacagataaattctgaaacaaaccatgatccaagtcagaatttggggcccgataaagatggcaactcagattgcactgaatagcagagtatttagaaatgaagggagctgggtcctcaggatgtgtagcagcatacattgtggaaaggtgaaaaggttacatgtaaaaacaataaccataaaacaaccagaagaaaatagtggcgaatatttagtttgatttttgggttcaagtgattctcctgcctcaacctcccaagtaactgggactagaaaatagtggcgaatatttagtttgatttttgggttcaagtgattctcctgcctcaacctcccaagtaactgggactacaggcgcgtgccaccacgcccggcttatttttgtatttttagtagagatggggtttcaccatgttggccagactggtctcgaactccttggccagactggtttcgaactcctgacctcgtgatccacccacctcagcctcccaaagtgctgggattacaggcgtgagccactgtgcctcgcctcttttttttttttttttttttttttaacagatagggtttcactctgttgcccaggctggagaacagtggtgcaatcatagctgattgtaacattgagctcctgggctcaaatgaccttccagcctcagcctcctgtgtagctgggactaacagcatacaccaccatgcccagctaattttgtgtgtgtgtgtgtagaaatgaggtcttgtcattttgctcaggctggtctccaatgcctgagctcaagtgatcctcccaccttggcctcccaaagtgctgaggttccaggtgtgagccaccactcccagcctgtagtctaatcttaagttaggagggactttctaaacataaaagcaaaggaagaaatcacaaatgaaaataacaaatacagcagaaaatgttataaatgaaacaaatgtaaatgagtgaaaaaacatgtgcacagcgtagcacagttgacttgacacaaggtcttggcaagggtcttctgagtaacagcagcagaaaaggaaaatgagccccttgagagcaaaataggccacaggcacacggggaagcgcccgaaatacagagcgccgataaagacagagatgttcactctgataatcagggaaacactaaaacagactgctttttcctgagagattgtcagaggtcatggttttgggaggaacacgaagacaggtgaggagtgctgcgccttgggcaggtcaggtggggtttggggctttccaggggcttttagtgggaggtgatgggttgtgggggttttgtaggcaacaaagagaggctggcacccaccacagtggctttctgtgtgaggggctgcctggcgtgtggcaggcctggcgcagctacccacacacctgctaccttgtagatcctggagccaggccgcagggagcggctgggtctgaagatggccaacgaggccgctgccaagaaccgggccaagaagcaggaagccttgcggagagtgacggagaatctggccaggtgaggggccgcctggctggtggggaagtgcgagggtggctctggcctgctcctgttcggcccctgccctgaccgtgtggaggcatggcccacgcggcagagtccagggcaggtccgcggggttctgcagtgggtactgtggcagctcctctatccagagcatggccgcacatggacaggatgagaggccccctccatcttctctttcctccacgtcctctttgacccgtccctaagaggcatctttaggcgtgtggtcctgctgggagctttcatcagccctgtggagagagtcatcgttccccttggagaggggtggggactccaactctcagaggcctgggggtgcaccccagcccccacagccaagggcggtgctgctgtttgacctcaggtttgacctgagcgctgctgtttgacctcagggatcccccgcatttgctgccatgctggcagtaccatcctcctcagctcagagtgactgtgtctctgcccaggctcttcctgggagccaagggaggccctgctgccggcagctctcagcccacctaaccctgcctctctcacccattcctccaccccagcctcacccccaaaggcctgagcccagccatgtcgccagccctacagcgccttgtgagcaggacggccagcaagtacacagaccgggccctgcgggccagctacacaccatccccagcacgctccacccacctcaagaccccggccagtgggctgcagacccccacaagcacaccggcgcctggctctgccacacgcacccctctcacacaggacccggcctccatcacggacaacctgctgcagctccctgcccggcgcaaagcttcggacttcttttagagccaggcctgggctgggctcatagacgcttcacagagcctgcagggcagctgtacacccagcagaggactccagccttctcggggcccaggcctgggccagaagctgttgaccataccaggagtcactggagaaaggggctgtgctggggccagactggcacaaggcactcgtgcccacaccacaccccagggccttgccaagctgtttgctgtttaattggccccttgaactgtcattaaagaacacctaggtacagtctggggggttgcctctccatcttgctccccacacgagccctagccttgccctggggcctgcatcacgtctcaggactgcggggcttgaagcgaggggccccccaggtgaggaagctgcaggtggggcggctgtgggagcaccgggtgactggcgttgctttctgcggcactcggaacctgtgttctgagttgagctcacatcctgcagtgctttctgcttctctggggggatatgaaggagaaacggagcccttggaagttgtacccttaggttcccctgcggttctgggcccaggtctgcagcctccactctgggcttgccggctgtgaggtgcgctggttataggactgtgtgggggctgcatatcaggtgatctcagctatcaccttctcccagcacctggcttccagctcatggggtgggactatcccactcacccctctgctataggcactgcccatcttatgctgctggccctggcctcacctggtcacttccaccaacaggagctcccagataacagtgggttgctggacagatcaggctgggactcttaaggggtgggggacgtggggccttcagtgctttatcccctaggaaagggtgcacgttatcccaagggagcccccaggaagtggggagggaggggggaggagcatgtctaggtgctgaccacctggagcacttggccagcaagtgggccgcatgctttgggagcaatgggtgacccagcaggaagcacaaaagaccggccagtgtgccatcatcaagggctgctgagcagcttgaagagccactgggtggggagggcacacggggaggtctcagctggggctgcccctggaggacagggcagggaacttgagggctgaggacagaaatctcacatgactccaggaaatagaggaagaggaggatgctgagcgagggattgtgagggagtgggggtaggtcagagggggctgaactgcaggaagccagggggagtcgtggaccactggagctggccagccccagggcattggggacaaggccaggtcagagggagacagtgtgggcctggtgggtggaccctggcagaggccctcttgtcccccacaaggccaggccacactgtgattctgcctgtacctgagcatctgtcctgtgctcctaggccggagaccactgtgtgtcaggtggggcggttggctgagtcccagagaaaaacactcctcactgggcactcttgatgcttgcacacaccctgtggtttatttggtggtcagtaaggaacgtctttgctgctaagtggaagaaagctaatggaacgtaatcaaaatagtggtttaattgacgaattttacttgcacctgtgccttcttcagatcctacctgcctacttagtttacgtgaaggccgactgcaccatgccccccaaccccgacccccaccacacacaacggggccattgtcatgctaggtgcttgctttccccacctcagctccggagatgtgatggtctttggccctggaggtctcggccagcctgtcctccatcctgttctcgttctcgggcaccaccagcagccggtgctgggttttggctccaagcttgtggtcgggccggtggtcgggcctcaagcctgtcttggtgtccagtttgcactcagcgcggtacttgccctccccctccctcttgaaggaggcagaagacgtggctttgggcttggggggctgcagccacgagtggctgaggatctcatcgatgtggagccgctggctgacgtcgggctgcagcatgcggtagatgaggtccttgcactcgcaggtcaggttcttggagcgcgggaagtccacacggtgctccttctggatacgcagcatcttcctgatgtcggagtcgtcatagggcatggagccgcagaccatgatgtacaggatcacgcccaggctccagatgtcatacaccttgggctggtaggggatgctctgcagcacctcgggggctgcatatgctgccgacccgcagaaggtcttgctgaggatgatgcgcccattgctgtcccgcaggcagcgcttggagaagccaaagtcagacagcttgatgttgaagtccttgtcgaggagaaggttctcgcacttgaggtcccggtggacgatgtccaggtcgtggcagtacttgacggcggaggagagctgtcggaacatcttgcgtgccacgtcctcatgcagggctccctggcacttgatgaactcgaggaggtcgccctggacgccaagctccatgatgatgtagatccgtccgtcagaggtctcaaagatctcgtaagtcttgatgatggagccgtggttgacagttgccaggatgtccatctcccgaggaaggaatctctccacaaagtcagtaggtgttttcttgcggtcgatgatcttgacagccacattgaacttgaggcgctcagagtaggcagatttgacttttgcgtaggaacccttgccaagattgatgcctacgatgtaacccttcttccttaggactgtggcatcgtccatggtgccaggagcgactggcgccgctgccgtctacatccccccgtcatgtgggccagcaggcattgtcctcatttacactaccggaggcgtctggctgggct

SEQ ID NO: 1666 - DNA, 919 bp, Homo sapiens
ggctgagggagaacagggtctctggaaccgtggaagccaggctggtctggcaggagcacccactccccgcccgctggaaggaagcctgtccccaggacaggactctggtggccctgctgctgctgcattggtttccctgtcacaagtcaagctggaggggaggcggcccacgtccagcctgtttgcatcacctggctgtggggactgaccctgcattggtctttgtcccactagggtgggtttcctgcagcttctttggctatgaagaaaagcacccccagggctgtgtccttggtgtggtaggacagttgtccctgacagtcacccagacaggcctgcatagcaccccagttacacagacagatttccacagcactgccttaccattgagcacatagttaaatctagggaaatcagtgcccagacatcaaagctagaaatgaaacatggtcagcaggagccttgcatgggcttctcttttgctggagcaagccaaaataataggaacggttttacattcctagtgccaggacccatctcgggtcgacaaaatctgaagacaagttaagggaacaggcagctgtttgaatagatcaattggatagtctaaggcagctctctggaccaagctgtaaaggagatacaatcgaaataatcactccggtaccacagtagacaggccttgaaggcactgggccccttttaatcggacttagcaagcattttttttgcctctgaccttctccttggaacaaaattagttaccagtagacttaggtgattgctgtactgcatgtaggcacataaccccaacctatataaacagtaagaaaattgtagcactttgagttggtctgctggaattatctccagccttctccctgtatccagttacagtgataaactcccttctttccta

SEQ ID NO: 1667 - DNA, 14698 bp, Homo sapiens
aaagagtggaatggagtcactggaaaaggcatccaaggcgagcaggtctttcccgtccttggacccgctgcgtttgtgcttgtgtttcctccgaaaaaaggaccggcgtgcagccgctgacagcgtctttgtggcgctattgtcatctttgacttcagacatgctgagcctcctggagaattcttggtccatcctgtggcacaggggacaatgctgggcagggccatcgagaccctgctgccctgcccttcctgcccttcctggtgagaaaagcaaaggtgggccagacactgggctccccccacactccttggcaggtctcaaggctacatctcctcccacgcccctgggaaccctcggtacatgctgcgggggtgacacaaacaccagcaccagggcaagctctcagagcaggcgattttttctactacagcatattcagctcggtgtcaaaaggaactgctaggacagccttcaattggtgacatgacgagttacgcttcctgccatagaagggaaatgatgcagggatgcaggctgcctcgaaaacatgctcagtgacaggagccagatgaaaggccacactatgcaatcccaaccacacagaagtccagacagggagacccatgggtatcaaaagtaaagtagtggctgcctagggctgagggctgggtgggaggacagtgggataaggggctgacagctaatgggtctggggtttgtttgaggtgacggaaatgctctaaaattaactgtagtggcggctgcacacacctatcaatatgttgaaaaccactgaatggtacactttgagggagcggcaaggcacgagtatctccataaatccatttttctaaaacacgttatgccttctgacccatcactgtgctctatacagcactgactcacactaggagcagctttttagaccagcacttttggcaaaatgtagagagcagaagctaagataagaagcagaatccctcctccagcagccctggccccagccccctcccatgggacagctccatggctggtggccctcggcgacccctgccccaccccaccccaggcccggagaacacttacacatatttgctgggaatctgcccgcgctggatcttctgggcattctcgtccagctgccaagccatccaggacccgaacgtgccctggggtaaggtgtcatccacgtagaggatgtcgtccttcttaaagctcaactcttgctccacatctgccagccggtcgtacagggccctggaccacagcacagaaggaacacgatcaggcggctctggccaccaaggacgaaccaggtgccttctgtggccaggcccctaaggctgccattctgctttgggctgtctccaaacttgatcaggaatcgccgagggtggtgattctcaaagtggggagccctgtgttttacataaaggggcaaagactgcctttgctcccctaacactgagggcgcatccccatcaaagaactcaccaagatctgaggccataacttccctttccaggtggcctttcccagttgcctccctcctcgaagcccaggcccggcccctggttcctacagactggaatctctctaggatggaaatatgtcatcttctaccctagagacagggagttgtaccgcatcagtgttctcatgctttctgcgatcttggatcttaggaaatgtgaagaaagctctgagctcctcctagaaagcctgctgccatccctaaatgcccacagcatttcatacagtagtaagggcactgaagatgcctggaagtccacacacactgcagagggatctgcaaacctggcttgggggacaccagaaaaagaggagcacagcacacaggaaaacggggcttgactgcctccaaattctctaggtcttaagccctaaagagggggcccagctggttctttaagccctaaagggttgttctaagtcacaatcatctcaacataaataagcgtgcagattgagtgtcaaggaatgatgatcatggccccagccttggggggcaagaaacagagagccattcaccaggaaaagagtctccagtgaaagcctctcctctggttccaaatctcccaccgattccccagccactggtacctgatgtagaagctgtcaccaggcaggcccttggccttcgtgaactcctcagggcggtactgcaccttcaggcggacgccatccctgggcttcagcatctccacatagacttcctccactgtcttgttccgcacgtccaggctgccatactgccagggatgggggtggatgcatcagaaggcagaagccagggggcagcttgggcacccgagaggggccagtgctgaccatacggcagaatttcaacatccctccttaactgagactctggctacctcccctctgcaggaaggactgagtcttcatggtctccccagtctccaggtcctgtgcatgctccctggacaccaggtcctctgccaagtggctgccctgcccttgacagcttatccaggaaaaaccctgttctggtgactggcaagtctgggcttttcagaatagggaccttcctcttgctgatgttgcctgtgcttttatttatttattttctgaaacagggtctccctctgtcacacagactgagtgcagtggtgcaatcacagctcacagtagcctatacctcttaggctcaagtgatcctcccacctcagcctccagaatagctgggacaacaggcacactccaccacacctggctaatttttttgttttgttttctgtaaagacagggtctcactatgttgcccaggccggtcttgaactcttgggctcaactaattctcccaccttggcctcctaaaattcacaggtgtgagccaccaaacccagcccaacttgtgcctttatattctcacaaaccatctcccccatgaggcaggagaccacagagaaagaccatcctctctcatcagaacagagtcctgcagctacatcacctgagggcgagcaccccctgatgcccagggcctgagccaaggctctgccctcaggttccctcaatggcctgcctggcttcacagggacctcctcagaagggcttggcaggattctgggtttacagggattaaaaatcaaccctggccaggcacagtggctcacgcctgtaatccctgtactttgggaggccaaggcgggtggatcacctgaggtcaggagtttgagaccagcctggccaacatgatgaaaccccgtctctacaaaaaatacaaaaataaattagctgggcgtgttggcgcatgcctgtaatctcagctactcaggaggctgaggcaggagaatcgcttgaacctgggaggcggaggttgtggtgagttgagattgcaccactgcactccagcctgggcaacaagggcaaaactctgtctcaaaaaaaaaaaaaatcaatcctgaggctggacacggtagctcatgcctataatcacagcagtttggaaggccgaggcgggcagatcacttgaggtcaggagtttgagaccagcctgggcaacatggtgaaactggtctctactgaaaatataaaaattagccgggtatcgtggcacatgcctgtagtcccagctactcggaaggctgaggcaggagaatcgcttgaacctgggaagtgaaggttgcagtgagctgagattgtgccagtgcactccagcctgggcgacagagcaagactctgcctcaacaacaacaacaaaagtcagccctgactggctcaccagatgagaggctgtactcctccgtctttggtgccacctgagatggcagcaagcccactgtgcaggtagatggaggcctggcctgctcagcagctcagaactcacctccaggatgaggtcccctggcacgaggccgtcaggacccttggcaggactgtcatcctccacctcggccacaaacaccccatgcaggttcccaccacacaagtgcaccccaagctccagctgggactttttgatgaagacaacgcgtggctccagggtcttcttgttggcatctcccgcaatcctttcaggaaaaaaacaaagttcctcaactgtgcacaaagaggaggcacaaaaagacaaagcagtggccaatgccctaaccgctttctgcctgcttcttggggtctcagaaccacagggagctgagaggtggcctctagttctactggctcggcgttcgggacaggatgctaaggtgcactggagatgaaggcaagaccccaggtccaaagccagttagcgggggcagtcaaaaccgtaaatcagtgcccctgctcccaggcccggctatcaatctcatgccttaaagatcaggatggcctccctcccatgtggatcacactcattttcctaacttagtacttcctaaggaaaggtaaagttggcctcactgtccagagcacagcaatgtattcagcaaatgtctacgaagaagcttctatagaccagcaactgctaacttgtgaagaggggccccttgccatcaaggcacttacaatcaaggaagggaagctgaaagtaagctgctgaacacatggagggagtgagatgggacagcgatggaaacagatacagggggcttcaggggagatgccagcccgggaggaaaaccttgcagcaggtaagttccaatgtgacagactctggtatagagaatgcagagctggcctcattctgtgagatgctgcccagggcttggtgaaggcctctcagtgctggagacacagctcctccaggacggcagagtgatcatgtcacaccatggcctggatggccctccctgcagccccaggccaggctggacgctgtgcagctcccatggagctccttcctcctcctgaactctgctgctccctcggcctggacttctctttatgcccactcttggctcttgcctgtcctgaacattttaatccagctgccacctcccctgccacactccagtgatcttcctgcctgctctgcggcggccggcagtgccctcccagcaccctgactctgctgcacgtgcccggcactggtctgccacctcattgggggaagcactgctgtgggtggccagagcccagggcctggccgggtgatgactgtgggaatgtgtccaaagacagactcagaaagcgagtgaacaagaaaaggagaagagaaagagaagatgcaggggaaaaaacaagtcaatagaaaacaggagaaaaagagaaaggaaaagagagagtagggaaggaaaaaaggaatgccgtgctcccggcccaactcctgaagacctggtgtgcggcctgcagcacatgaggccagctgcccagtgcccacgccacttggagaatgtgctcagccccacccagccgaagcggacacagggaaggctcacagcaacgtctgctgacctggagctgctctgcttggctgggggggtgctaggcccctcgtcctgctccatcagtgggtcgatgacagatggatgctccggggtggtggtgccactgccctggagagtggagtgggtaccggcagggtccaggtgtgagctggaggcggaggacaggagggataaggagcagtacgaagccacccagagccacccccactcctgtggcaactagatctgagctataaatggggaccaggtcacatagccctgcaccctgtgccctgagcagagcagacacattagaagcctggacccatgacatccacctgtcctctcccctccacctgtcctcagctcaggggccctctccaaaggcatctgacctcaggaagctgtgagcatcctgtctcttttcctctgcctgtgcatcccatctctcctgctgagcttgtggcgcagcactgcagggcatgcctccccttcttttctgcccttcaacccacagctcaggggcagatacagacaggtgtacagcatctgctcctggacagggagccaaacactttgagtgagaatccacccccggggccacaactcctggctaccatgggcccctgctggtcagggggaccacagccatctgtttccacaccccatttcaggaggagacagcctctctatatatgccccttttccaaaatccagggctggtcaactctctctttagcagcagtaggatccccagaacttacggctggcaccctgggtctccctaaaatgagcagagtgctgctgcacccacctctccacccccagcccagacggccctgggaggcccgcactcacctggaccgggagtggctgctgagctggtgcacgtgggggttgtactgggccaggatggtgatggtatcacactgctgcccgatgatgagccgcgcctgctgctccgtggcgctccgcaggtttatgccgttgaactggggaaacaccaggatgggctcagtgggggggtcggggctgtggacagggaggaggccctggggacttgggagcagtgctgttccctaggaggaggagagggggaagaagtgcaggtttccatgggcgccatgcaggagggcagctccctctcacctccagtaactgatccccatactcgaggccagcctggtgagcgatgctccccacggtcaccttggagacgtagatgccgcccttctctccactcacgatggagatgcccagcggctctgagcccttctgcaccttcacgtggcgtggctcctccacataaggcctaaggaaaagtcaaaagtttcggggactcagggtcaaacaaaagggttggggagagcctgagctctctgatcaggcatatgatctgacagtgcagaaagggccccgagcctggatgctcccattgtgacacagctacatggggacatggtgggcccacccctgtgtgacaaacgatcacattcccacagcctcacgcaacacgagcacagcacacgcagacacgcaaccacccaggccaaagacacagagaacggtccgtgtgaactataaacactgatacatgtggattttcattacaggagaggagctgccccacaatatgcaattacaaactctggggggtcttgagatgccctccgaggaaaagagatggctcctgggatgacattccatcctaagggggcaacagaaaataatccagttttatgtttactggctacacagagtgatgcaaactggtcacggaaattaagctgctgcagacccaagcctttgtaaagggagaaggctgggagcaaggctgcagccatgcacttgctgccctggggctgtacagtgcacccaagggcgccggggcaggggctcggcagggagcctctgggcaggccaactgcatggtggaagacctgggcctggtggccacgggcagcctcagaagagatctgtggtggcagagacatctggaaggtgacaaaggttagaaagaagataagggacgctcagaggagaaagacaatcagagacacctggaacataacagaaaagacagtcaagtgatgcggagcctcccgttgggacttcacgccactcagggcttcattcctccaaggtatggacacctgagattttcctcgcaggataaaaccatatagccaaaggctgagggggccagtccaggtcccctctacagcacatggtcaggatagattctagcggggaggcacctaaaccaccccaccccggccacctggaggcagagcagcttcccacttggcagtctcagcctgtggccctatgccccagccctcttgggaaggggaaattaaaattcttcttgagttgtccctgctctctcccaccctccaaagtgttcccacttcccaaacttgcccactctggaaatcctcccttgaccctccagctcagacagatccaccccagactacacccacagtcccttccaattcaacacggattacagccccgtgctgttgagagctgcagagccctcagcacacagccacccctacatcaccctcctgccccagccttagatgatgaaacagaggcccagagcagaaagaggtccacctccgtacaacacgtgtatcacaataaaggagcaagcaactaagtcacagcaatagccacccaacagaacaatgatctgaaccaggttcccaggttccagtgacatgcaaagacgtaagggacacaccacggggtggggaggcccgatcggcatcatttcacttatatttatctgcatctgcaaacaaaagtatgtgtggatttatgcacaaggaggcttcttatgtaggacattaccaagtgttaacaatggtgtctccagttgaggggatctgagctaatcttttttttctttctttttttttggaggcagattcttgctctgtcacccagggtggagtgcagtggcatgatctcagcttgctgcaattccacctcctgggttccaatgattctcctgcctcagcctctcaagtagctgggattacaggtgtacaccatcacgcccagctaatttttgtatttttagtagagacagggtttcaccatgttggccaggctggtctcgaacccctgacctcaggtgatatgcccgtctcagccacccaaagtgctgggattacaggcataggctaccgcgcccagccagagataatctttactttatagtcttctgaatgatttgaattgtttgtaatatgcatagaagttttctctaaacaacagctgcttctcaaaagaggtttataaagtatacttaaactattaaaaatagctaaaaacataatattaagggagatttgattatgtacataaataataaagcatgtttatatatatatatatatatatatatatatatatatatatatatatccaaagggtaatggcaattgaatctcttgttgaagaaataatctgtgacttttttcttctttctacttttctgttttttattttttgagacagagtctcgctctgtcacccaggctggagtgcagtggcgcaatctcagctcactgcaacctccgcctcccgggttcaagcaattctcctgcctcagcctcctgagtagcagggactacaggtgcctgccaccgtgcctggctaatttttgtatttttagtagagacggggtttcaccatgttggccaggttggtcttgaactcctgacctccagtgatccacctgcctcggcctccttacaggtgtgaaccacagcactcggccttctttctacttttctatgtctctgattttccataacaagtataaaatactgtacttcagaatctgggaaacggggccatttttaaaaagaaagctgttgctcagtcaggtcacacatgtcaaatttcatctccaatcggatcctaaccaccgtgagggcaggagtcactcacatttttctccctcctggagcaggtcctggctctccgtgccctgtggggagctaagggaatgcttggcagtgggtggcaaggccttttccacaactgaagaacccacttcacttggggaaggtcccgtcctctctgtggccagggccggggctgagtaaaacaggccagcatgctcctgcgcgtgccacatggtaagagctccgtcagcatttcttccgagttacacccgattcccctacgggggccaggcctctgtgttttgctgtccttccgttacccctcaggttctctggttggttgccttttaagttcagattttcaagtcaaatataagattttctctggctgggcacggtggctcacgtctgtaatcccaacactgtgggaggccgaggcgggtggatcacctgaggtcaggagttcaagacaagcttgaccaacatggtgaaaccctatctctactaaaaatacaaaaattagccaggcgtggtggtgggcgcctgtaatctcagctactcaggaggctgaggcacaagaatcgccttgaacttgggaggcagagattgcagtgagccaagattgcaccactgtactccagcctgggcgaaaagagcaaaactctgtctcaaaaaaaaatatgttttcttaacatagggcccacccctgctgaggctcacagctacagaggcctcagctttctggactcaaatgaaagagagtatctgtgtttcttttggtgattaaataaaagtaagtttatcagagctctttaagatctacaatctagacagaagctgttaaatataaacacaatctagtaagttccatctaggggaacaacagagagggatgtgtgtgcacagtgcgcgggggtgacggattccatggaggaggtgcctctggacagacagcaagcctacagtcaacctgaaacctaagatggacctacattctaaaatgaaccagtaccagtaaaaagctaggctgcacatttatgctttcttcctgtgtatattttatttcacaacagaaagcttcgaatgagagggaaaaagcaaagggtaagaatgagtcccggtgccagccgctaaccacgtggccacaggtctgtcactccaacgtctggatccagtttcctcaactgtgaaacagggataacaataataacgacactggcagggtccctgtaaggatctcgtgacttagccacacgtaaagtgcttgaacaagggcccaggaaggtgtaaatggtgccatgatggcacgatcaccgtcaggtcatttccagcatcatctactgtgagccctcttggctccctgccttgccatccacacacgccccacctccctgcatccagtgccccatggcacttactggtgacaccagcaaatgctgggacactcaagctactcctgctgcttctactaagccccttccctgcagagcccaggcccgctgccgggatgcacactgtccactggtttacccactccaccgatgaccggccatgctcacctgtcctttctccgctccccgagggacgcggggttgacagcgattctgggcaatgtggaggctgaggtctgggactggctacaagaggacagggtgtcgatgttcaggggtgactgtggaggagtgctgcattcagaatgtgacactgaacctgcagagaggagcgggtaatgccggtgtgaactcccatctcacttccccaacagccaagaccaagaggcaggtgcgatccagacacacagctctatccccactgcatcgcatagtctggagctcagatgctaggctctgcattgccccctaccccccacaccaccaggcctactgctgggctcagtgaatttttactgactgactgagatgactatgaagttctcagctaagcccagagactccaccatgaggagtcagaccgcaggaaaagcaggagagatgggaatgtcgagaagtccttacctctctcggagcccacgacactccgcggatatcttggtgttgatgggattttaatgcgttccgccttgaactgcaagttactcgaagaacctattgttccataagggaacaaaacttcaggcctcatggttaaacaccaccctgtccttcctctccaccaggctaccagtcaggataataaatgcaaagctgggccctgctgtttattcccaagggagccttgatatggaacagtcaagaaaagcagacgtttaacatttatctcaatgaactgtgcaggcccagactgctccagaacaggagcgcacaagtctcacttccagccacggaacagcagcctaagagacacggcagctgctccatcttttctccccagcgccagagttccccaagatctccatgggctacctttgtccgactctcctctggggttcactttccatacaaaaatgtatgaagagccatacaaaacagtccagaatgaggccaacaacctcagggacacagagcaaggctcctagctgaggggtcacctgaatggccataaggcccccacagaaagcggaaggcgaaagcaatggctctgacagcagcatgggcatggctggcccatgaaggaagcagcccttcccagtagagaaatgagctcagtcccaggaggtgacaggagctcgtgtggggagcccacccgcagatctggacattaggatgcaggcagagatgaaaagcttggcaccctctgcagcacaaagtccaagtggtgcagttacccaggcgggcgctggagggcagtgagttggacccatgggtggctctcatctcggagtagtcgctgcaggtcctgtggctcaggtccaggctcaggcgtccctggtgctggacactgcgtaaaaacaagaggtgaggagttcgggaggagaaccaggaacagatgtggccactggggagaaacacacagaccaggcaagggttcccaagcgggcagaagggaggcccaggagccactgattatcagccgaggatagcaggctgccctcagccactcccggaggtggcatccactaagagccttcaggaagtagaaagggccacacacatggggcggtcagtatcatacccactccagccatagggtcaggattaggctcactaggaagaagtgataaaaaacagaggttttgcaacctgggtgggcctggggagggggaacctgtcctcccaggaagtgggtaaggagagacaaggcacagaggactttggggaggggacctatgtgcctcactcgggacagcgtgcctaagaaaatgaagggcagagcagggatcgcccacatcaggctgccctgagaccaggcctcaacagcatctttttccagctatgtaatgaggtgacatctcttccctgcttaaactctacagtggtctccactgtccttagaataaaatccaaactcttcatcacggctgcaggtcccacagggtttgtgccctgtgacctcaaacctcttcttgactcgctgcccctttgccaagctcccacgactgtgcctgggtgccctggccttggcaccgatggcccttctccctggaggctccagcccaggtcttgtgcagctggcctctttcatccttctggtcacagcagcatcccctctgccacagggcccttcctgaccacccactctaacttgccaccctcttccaagttacagcccagcctgtcaccctgtttgactgccttcatagcctcttggcaccatctgatatcacttcgttcatttttttttttgtctgcctcccacatttgaaaaaccaaacgacatgagctagaagctaatttgtttagttcagcaatgtatcctcttataattaggatagaccaaggcatgtagtaggtgctcaaaaaatatctgtcaaatgaatgaataagagtggcttggagccagcccaccctcttatgaagtaccagtttcctcatcttcaagacagaaacagtaataggacttagcccatgaggttgctgttgattcggtgaaatgatattcataaaggtctgagcacagtggctgggacataagcactcaaacatcagctgctatcactatcgtgtccttccagtaccttttgaaaccttgtgctgatgaattcagaaagcagccctaaggctccctttccctgtgctgctctagccagtcccctcccaggcaggcaaggaagcttctccaccaatgagcctctttatgcactcatggttccatgtccaggcaggcttgggcagctggggtacagagaagcgtagggtgccttcacatacctgggatgcaaaccctgggggccagcatctcgggccgcaggtggagagctgcaggggccgaccctgtgactgcgcacagtgtagatggggttccgcaggatggagctcacagtggtgctgggggtcaaactccggggaacagtacctagaaatgggcttggtgagaaaagacgccccaaaggacccagccagcccaggacttacacaagcctttcccctgtatcccaggacgcagccgcagtcttttgggaaaaggacttgggagatgagttttaaccaccaattcacaatgtggctgtggctcctggcctgtctccatttgtaaaaaggggggaagtctctttcatgcttcctatttcccaggttgctatggggagaaagcatgttgacaagctaagacatgtcatggctataagacaaaccatcccagacaggacagcatttcccagttctctggacctcagggctgaaaacacatggcagctctctgaaatgctgcctcccctctccctggagactaggcatcccgagtttacaccgaccctcagccccagcccctggctggctgactcacccacagacggcctgctagggtatagcggggggttgctgtgccggctggaatgcccaggcgagtaaggtgcccactcctggagctccggggagagttctccactggccgggacacacttctgttcctgcagatgcaagggcaagagtgtctgctagaaagagtggagtgtggccaggcgcagtggctcacacctataatcccagcactctgggaggccgaggcgggcagatcacctaaggtcaggagttcaagaccaccctggccaacatggcgaaatcccgtctctaccaaaaatacaaaaattagctgggcatggtagtgggtgcctgtaatcccagctacttgggaggctgaggcaggagaatcgcttgaactcgggaggcagaagttgcagtgagccaagactgcaccactgtactccagcctgggtgacagagtgagactccatcttaggggaaaaaaaaaaaaaaaaac

SEQ ID NO: 1668 - DNA, 355 bp, Homo sapiens
ctatacctccaggaactgagcaggaatcactactggagcaagcttcggccgaaaactgggagcagattttggccggcgacgcttctgccccagctcatccaccttctgggaggtgaggtcctcatcacaggatttcttggccggcaggtgggaggagtccccatctccttcagggtagtagctggaagcaatgcggaccctggccttgcgagggggtgatgcgtgcatgggctccccggggtccacgtcagggggcagggcgctcgggggactagtggatggggagctgcccaccagagtggcttctgactcggagctagtctccagcctgtgctggaacttaatggagtcgctc

SEQ ID NO: 1669 - DNA, 1305 bp, Homo sapiens
caattaattgccagccttggttcacactgatgagtgtgctcattggagagactcagcatgcaaaagaaaagactcatcaatttgcagttatttaatttcacgaactgccggatggtggagtcagtagcagcggctgggccgcaacatggcgcctcccacctagacttccggtcaggaaacttccaccttcctccgatttacgtgggcctgcatgagcctacttctcttcttattctagtgccagtggcctctggagtcttggtccttcttactggaagtagccctcctctcctgttacagaggcaataattctccagccttccggtcgccgccaaagcctcctgcctaatcacttcctgtattgtctccctgcggctctttgcacagaccttgggctctgtcgtctctggattcttactgatctcttcctcttctcccaaccgccttgtcatgtctctttgagctatgtcaggaggaacggaagggcactttcttactacttttgttagccaaacggacaaactgtcccctcccctttgttgtaaccacacattcaaggcttccttcagtccagccccatctcccttttcgttgcctccctttcactactccaaatgagcttgccatactttaaacgggtcttgtactttcttatcccttctctggaatgtcatttctactgaagaaaatcctactcttccctcaagacccttctttaatcccctcttgccatggaaacttgagattttcattgaggagctaagttggaaaatataaactagagctgagtctctaccctggcactattgacatttggggccagattattcttggttggggagactgttctgtgcactgtaggatgtggagcagcctcccaggcctctacctgccaaaagcacactcccctttccccaagtggtgacaaccaactgtttccagacattgccagatgtcctgaggtgggagtgagggtgaacagaattgcctcccagctgggggctgctggactaatcaacaagaagtggcaaggactgcaggcaaattgcctcagcacttagatttagcactgcaaggccacttcgacaggtggtagtgatttgtgcgtctcatttcctattcttgattgtgacaaggttctggaggatggagacagctacccctgccacagttcccacaggctatgttgtacatagggcttcatatttaacatgtgagtgaatgaaacacatgagcccgagtgctcttcaggacggcaaggcctacatcaagatggtaaaccttcagttcttaaaaaaaaaaaaa

SEQ ID NO: 1670 - DNA, 285 bp, Homo sapiens
gaaatatcaaacatctgaggagcttataattagttaagcatttacgtgtattaatatatcgtcatgtggacagttgagaggggagaaggcactagacaaatttaaaattgttagaaaccattggcaactgatattcagagcctaagttaaaagcaggatatgtctcaggagcaaatcttttgtgtaaatcctggtatttttactgcagacctttaaaatgacagacgcgggtgagtaaaaattacttctggaaatggatatgattaattaattcaattaattaat

SEQ ID NO: 1671 - DNA, 274 bp, Homo sapiens
tttgtggttcaagcagtttgtgaaagatttgaaagctgcatacatttggggtcaccccaaaaagtcagccctgggccacgagcagtggcagaggaagcagttacagagaattaacagagttacataaaatttactcactttgtaggcaaatatttctaaccttggctccctttcttaaagatctatttccccagctttgttccccagctcaaaagcatttcccaacacgtggatctgctaccactggatctgccaaagcagaatcctctttttt

SEQ ID NO: 1672 - DNA, 8159 bp, Homo sapiens
  misc_feature (7325)..(7325): n equals a,t,g, or c
gctttcccctgcctgcctgtctctagtttctctcacatccctttttttttttcttttctctagccaccctgaagggtcccttcccaagcccttagggaccgcagaggacttggggaccagcaagcaacccccagggcacgagaagagctcttgctgtctgccctgcctcaccctgccccacgccaggcccggtggcccccagctgtatcaagtggaggcggaggaggaggcggaggagggtggcaccatgggccgggcggtgccctccatgcccgggggagtgaagacactgctgccatggacagcccgtgccagccgcagcccctaagtcaggctctccctcagttaccagggtcttcgtcagagcccttggagcctgagcctggccgggccaggatgggagtggagagttacctgccctgtcccctgctcccctcctaccactgtccaggagtgcctagtgaggcctcggcagggagtgggacccccagagccacagccacctctaccactgccagccctcttcgggacggttttggcgggcaggatggtggtgagctgcggccgctgcagagtgaaggcgctgcagcgctggtcaccaaggggtgccagcgattggcagcccagggcgcacgcctgaggcccccaaacggaaatgggccgaggatggtggggatgccccttcacccagcaatacgccctgggccaggcaagagaaccaggaggcagagcgggagggtggcatgagctgcagctgcagcagtggcagtggtgaggccagtgctgggctgatggaggagcgctgcccgtactgcccgagcgcctggccctggactatatcgtgccctgcatgcggtactacggcatctgcgtcaaggacagcttcctgggggcagcactgggcggtcgcgtgctggccgaggtggaggccctcaaacggggtgggcgcctgcgagacgggcagctagtgagccagagggcgatcccaccgcgcagcatccgtggggaccagattgcctgggtggaaggccatgaaccaggctgtcgaagcattggtgccctcatggcccatgtggacgccgtcatccgccactgcgcagggcggctgggcagctatgtcatcaacgggcgcaccaaggtaaggctaggtgggggcctctttggaggggctttgcagcaccctggtttgcagcattcagtgctctgagcacagtgggtttggagacaggcttctgggaggtcacagaaggtttaggcagttcagtggagtgggtatgcttacttgtggggacttgggggggtctttatcctccctacgggccttaatgtgtgcacctgataagctaggagtttgtcctggagccacagtggttcttttttttttttttttttttttcttttctttttttattgatcattcttgggtgtttctcgcagagggggatttggcagggtcacaggacaatagtggagggaaggtcagcagataaacaagtgaacagaggtctctggttttcctaggcagaggaccctgcggccttctgcgtgtttgtgtccctgggtacttgagattagggagtggtgatgactcttaacgagcatgctgccttcaagcatcgccacagtggttcttgactttgccaggaaccctcttaaactcatgagagctgctgacattcacagcgtggaccttggtggggttcatggcctcctggtgtcagtctgtggccccagaccaagcacggggatgtagataggcacacagttcacctggccgttctctgttgctgtctgtccctgtccacatccttccctgtgctcctgtcgtccatccctgtttgctggcccatgtttctagtccatccatcctgtctccaaggcaggagaagcagaagggggagggtggctgtgatgagtgagccctggcgtgagggaaggaaaggggtgctgcccgctgcgcggagtgcttggccctggactgcattgtgccctgggtccccactgtggcatctgcatcgaggacagtctcctgggggtggtactgggtggctgcctgttgcccaggtggagctcatccccatgtctcccacccttcactgtcccagtccctgccctccattccccctgtcctgtgtgtcacttcctccctacccatgtctgtctcttcctctgcctttatgtgtttgttcttagtccctttttctttttgctttagaacaatagttcttaatggtattttggagcctgggtctttttgagaatctgtcagaggccacagatcctctcttaagacaaatgctcatttgcttggagtttccgggcagttgtcaaggcctcatggcctccagctgcctgttcaggaacctggggtcaggagcccagcacaggacagtggtccatagggcctttccgggctgctgacaggatcattgtcttcatgggtggtgtgggggcctggccttgagtccaaggcttggtgtcctttggacaaggccctgtggggagtgcccactgctcaacacagtgatgcctggctggctgatggcacgggcagtgttgtgccctgcaggcgtgaggctgagctcctgatgtcctctgcctcctcctgcagatcccatcttgggttctgcttctgtgtggctttcctctcaggctggagctggctcagggaccagggctcccccggggccaaggcctgtttcctccccaccccagctggaacttgttctacttccctctccctcccgttacttgatagctgagccagagccggcccctccctgggcttggctcctgtgcgggcgggatcagtggcctccctggctcagcatcttcaccccaggttggctgtcgtcctcgtcagggggagaccagaagggctgagtggcccagatgggacactgctctgagcctcaatttgctgatccacggaatacgaaaaccaggttacatccccagtgagtctggcagtttggggaggggagagtaggagaagatctcttgtgttttggtgcctctggtgcccaccttctatgtggttggggacagggccccagcgaggattggggaaggggcgtgtttggacttttttagccctaggtgaccttgattgtcctagggaagtaaggacaggccaggctggactgagaacataggggaggagccctcccctccccagtgagacagcaactccaggctttcccgcttttagatgggccccatctggactctctcctgtactccagagtaaggctgtggggtgctcaggtgggctgcagcagttgccgtggggacatggatcaccagtgtggctagagccagtagaaacgtgcttcttagtcgttctgagtggagctcctgtgtcatccttccttcccccaactccctggttggggacaggtgctccgttgacctgtaggtgggagagagttgactcccactggcagcaagggctaccagaggggaccccagggagagtccagcttgcttggtttgctccttgaagagcagcttggaggtgggacagtcacaggcttctgactggggtgtgtgtgtagtgggggtggggctcttggcaggcagattgtcaccaatagcctttaagtctttggtctcctggccctggtcccacctgtccctcccctaggtgggaggcttggagagcaagtttcctgaggccttcccctgtgagggcaggaagtagatactttccttggggccagaggatgctttcacccccaaggtgtgtatatgtgggggaagggtggggccctaaagagcaggttcctgtttctgtgtgagtcccatgtgcttggtgggaggcgctgtgtgagaatgtacagggcaggaggaaacatagcagggctggggtgcagaggaggcccagagcagtgcactcagtctgcaggtactgcactgggcactggggagaccaacctggccccaggggcttccctgtggctgccttccagggcagtactaggtaaacaggtgcctgtgctgatgccatgttgctaggagtggaacggacaatcagccggagtactcaaggtgacccttggtctctgaatcctgaataacaaagagggtcagaaggaagagtgtcccaggccagtgctgaggccttgtggtggcgatgagctcagcctgttgaggcatggagcagagtgatgggagaggcacatgaggttgggggcctttgaggctgtggttgggaatttgtattttctcaggatggagtgaagacctggagaggaggggctctggctgctgtgtggggatgaattgtgggaagagggtgcagcactggaccccttccctgccacccatccacgtgcatcatcagtgtaatctctgattggattcctaattggggaggtcttgcccatctctagtcagtaactcactgtttctaagcctcctggaccatggcccaattcttctcccagtgaggtggttgctcagagtgccgacccttccatagggagtgagcagtgcaaagaaggtgccccctcctgaaccttgaagtgtagccattagggttttccctggggggccttctcactaattgtactctggtgctgccagagagaaggttgtcagcttcccactgctaggtggcagtagatggtggcagccctctctttccagggcaaggtctggtggatgaggtgcacatggttaatgcagagcagcttaacatccaccacagagggtgagccctgggataatgtgttgggaggcgtcctggggagggtgaggattgaagcagcccagtctgctgtggcgtgcgtgcttggcaagcatcctgttgtggcagtggccactgatgtttgatcgtgaatgtttatcttgggactgtcttgctgggccgggccataggtgtagctgagcattcgtggggaatggacgccagcagagttgtaccagggcagagaggtcagggcagagaggtcaagacagatggtccgggctggggagaagttgaagggtccttgtgccagtcctcccctttttgtgtgctacctcatcttgccactgcagtgactttgggcagagggtgggacagggaccttttaaaatttttaaatggcatttcagcctgtgctccagttctccatgtggcaggcactgtgctggctgtcttcccagacacttgttatcttgttcacttgttccacaacaacctgtgaaatagctgtgagctccattggatccatggatgaggaacctgagaccaggaagtcacctgcctgatgccacagctcatgtggcagcactgagacttgaaccagggaattgtgtctgcagaagtggctgggccatttcctttacctctcagccacctttctgccagctccctgatgacaaacatcccggggccctggccacagcattgtagggctgggtcaggggagtggcaactgtcaggcagaggaaagaaccctgtagacagagaaaccaagccctgcaatgagtcctgttagatctccaggagttggggctccagaacctcccaagttatgttctcagagagattaattgctaccgctgtaaacagcagtgtttattacccctgctgtacacatcaggcagttgaggcccattcaggtgttggaactggctagggttacccagcaaattatccttggagttggaattaggtctttctattcagactgtagcttttggctcctgttcggaggtctatgggacagataatttagtggggattctttgtagtccagggcagcagttcttaacattgctgcatggtagaattacctgggaagctttaccaatttcaggcccttccttaggccaggtacttcagaacctcagagctccccagggggctccactccacagccaagggtaagaattcctggtctagggctgtgaggccacctccttgcacacctgaaaatgtttaaattggtattattctactgaaatggctgaggtggggtttggggtatcttgaaacaaatcaaactctgttactaattgagccctagctgggtgccaggccccaggtatgtgtgttgggagggagtgggctcttgaggcccaggagctgaggtttctgatagacttggggatgggattttggctgaaaaagaaagtcttttggggcaggagcttggaacccttgacccaaggagtcatggggaagatggggcaaggaggggtgggaaaataggtaattcatggctgcttctctaagatgtgcctgcctagccccagtaaacctacctccctccatccctgccaggccatggtggcgtgttacccaggcaacgggctcgggtacgtaaggcacgttgacaatccccacggcgatgggcgctgcatcacctgtatctattacctgaatcagaactgggacgttaaggtaggggtgagggtgagggtgagggtggcgctggggctagggctggggcgggggtggcgtgcgtccactccattttccactctcagcccagattctggcattctcctgtttctcttctcaacacacagcgggcagtgcgatctgccggctcttcctgggaaatggcacctcctcctctctagcggactgtgtggtgggaactcccctctttccgggaatggtgctgtctgcccagccccacccggccttgtaatgaacactttcccccttttcctgtctttagtagcttcctgcccatctccatggtgatgcagtctctgggttgtcattcactttgagagcccgaggggtgggagggagtgatgcaggcagacgctgcgcctcctagtgggctcccggggcaccgtgggaggcagcggctcctggccgtaccagctagcctcatcctttggcctgcccccaggtgcatggcggcctgctgcagatcttccctgagggccggcccgtggtagccaacatcgagccactctttgaccggttgctcattttctggtctgaccggcggaacccccacgaggtgaagccagcctatgccaccaggtatgacctgtacttctggagacgcacccaggtgctccccctgtgacaatgtcctgtcagagcctcagagtgactagggagcgacgaagtattgagagggggcctaggtgggagcagaaccgggtggctcaaaaggatggccgcctagtgtgtgtggatatggtagctggaattgcagaaaactaatgtccaaccaccctggtctccaggtacgccatcactgtctggtattttgatgccaaggagcgggcagcagccaaagacaagtatcagctaggtacctgcttccctcccttcagtccttcctattctgtgggccctcttggcgtgnatgccaccccatccccctcatcagcctcttgttaaatcccacactcatttttcttcatctctgcccaccttccttagcccactctcctgggtaccccaacaggagccccatttcttcctggtcctctccccatctccccaggtttcccttggcttctttgtccttctgatgactcactgtctcctgtcccctctcacccccagcatcaggacagaaaggtgtccaagtacctgtatcacagccgcctacgcccacctagtggccagtcccagagccgcatggcagacagcttaaatgacttcaggagagccctgggcctgtgctggctgctccttccctgccaccgctgctgcttctgactttgcctctgtcctgcctggtgtggagggctctgtctgttgctgaggaccaaggaggagaagagacctttgctgccccatcatgggggctgggttgtcacctggacagggggcagccgtggaggcaccgttaccaactgaagctgggggcctgggtcctaccctgtctggtcatgaccccattaggtatggagagctgggaggaggcattgtcacttcccaccaggatgcaggacttggggttgaggtgagtcatggcctcttgctggcaatggggtgggaggagtacccccaagtcctctcactcctccagcctggaatgtgaagtgactccccaacccctttggccatggcaggcaccttttggactgggctgccactgcttgggcagagtaaaaggtgccaggaggagcatgggtgtggaagtcctgtcagccaagaaataaaagtttacctcagagctgcacacatctga

SEQ ID NO: 1673 - DNA, 13327 bp, Homo sapiens
gctttcccctgcctgcctgtctctagtttctctcacatccctttttttttttcctttctctagccaccctgaagggtcccttcccaagcccttagggaccgcagaggacttggggaccagcaagcaacccccagggcacgagaagagctcttgctgtctgccctgcctcaccctgccccacgccaggcccggtggcccccagctgcatcaagtggaggcggaggaggaggcggaggagggtggcaccatgggcccgggcggtgccctccatgcccgggggatgaagacactgctgccatggacagcccgtgccagccgcagcccctaagtcaggctctccctcagttaccagggtcttcgtcagagcccttggagcctgagcctggccgggccaggatgggagtggagagttacctgccctgtcccctgctcccctcctaccactgtccaggagtgcctagtgaggcctcggcagggagtgggacccccagagccacagccacctctaccactgccagccctcttcgggacggttttggcgggcaggatggtggtgagctgcggccgctgcagagtgaaggcgctgcagcgctggtcaccaaggggtgccagcgattggcagcccagggcgcacggcctgaggcccccaaacggaaatgggccgaggatggtggggatgccccttcacccagcaaacggccctgggccaggcaagagaaccaggaggcagagcgggagggtggcatgagctgcagctgcagcagtggcagtggtgaggccagtgctgggctgatggaggaggcgctgccctctgcgcccgagcgcctggccctggactatatcgtgccctgcatgcggtactacggcatctgcgtcaaggacagcttcctgggggcagcactgggcggtcgcgtgctggccgaggtggaggccctcaaacggggtgggcgcctgcgagacgggcagctagtgagccagagggcgatcccgccgcgcagcatccgtggggaccagattgcctgggtggaaggccatgaaccaggctgtcgaagcattggtgccctcatggcccatgtggacgccgtcatccgccactgcgcagggcggctgggcagctatgtcatcaacgggcgcaccaaggtaaggctaggtgggggcctctttggaggggctttgcagcaccctggtttgcagcattcagtgctctgagcacagtgggtttggagacaggcttctgggaggtcacagaaggtttaggcagttcagtggagtgggtatgcttacttgtggggacttgggggggtctttatcctccctacgggccttaatgtgtgcacctgataagctaggagtttgtcctggagccacagtggttcttttttttttttttttttttttcttttctttttttattgatcattcttgggtgtttctcgcagagggggatttggcagggtcacaggacaatagtggagggaaggtcagcagataaacaagtgaacagaggtctctggttttcctaggcagaggaccctgcggccttctgcgtgtttgtgtccctgggtacttgagattagggagtggtgatgactcttaacgagcatgctgccttcaagcatcgccacagtggttcttgactttgccaggaaccctcttaaactcatgagagctgctgacattcacagcgtggaccttggtggggttcatggcctcctggtgtcagtctgtggccccagaccaagcacggggatgtagataggcacacagttcacctggccgttctctgttgctgtctgtccctgtccacatccttccctgtgctcctgtcgtccatccctgtttgctggcccatgtttctagtccatccatcctgtctccaaggcaggagaagcagaagggggagggtggctgtgatgagtgagccctgggctgagggaaggaaaggggtgctgcccgctgggccgagtgcttggccctggactgcattgtgccctgggtccccactgtggcatctgcatcgaggacagtctcctgggggtggtactgggtggctgcctgttggcccaggtggagctcatccccatgtctcccacccttcactgtcccagtccctgccctccattccccctgtcctgtgtgtcacttcctccctacccatgtctgtctcttcctctgcctttatgtgtttgttcttagtccctttttctttttgctttagaacaatagttcttaatggtattttggagcctgggtctttttgagaatctgtcagaggccacagatcctctcttaagacaaatgctcatttgcttggagtttccgggcagttgtcaaggcctcatggcctccagctgcctgttcaggaacctggggtcaggagcccagcacaggacagtggtccatagggcctttccgggctgctgacaggatcattgtcttcatgggtggtgtgggggcctggccttgagtccaaggcttggtgtcctttggacaaggccctgtggggagtgcccactgctcaacacagtgatgcctggctggctgatggcacgggcagtgttgtgccctgcaggcgtgaggctgagctcctgatgtcctctgcctcctcctgcagatcccatcttgggttctgcttctgtgtggctttcctctcaggctggagctggctcagggaccaggggctcccccggggccaaggcctgtttcctccccaccccagctggaacttgttctacttccctctccctcccgttacttgatagctgagccagagccggcccctccctgggcttggctcctgtgcgggcgggatcagtggcctccctggctcagcatcttcaccccaggttggctgtcgtcctcgtcagggggagaccagaagggctgagtggcccagatgggacactgctctgagcctcaatttgctgatccacggaatacgaaaaccaggttacatccccagtgagtctggcagtttggggaggggagagtaggagaagatctcttgtgttttggtgcctctggtgcccactttctatgtggttggggacagggccccagcgaggattggggaaggggcgtgtttggacttttttagccctaggtgaccttgattgtcctagggaagtaaggacaggccaggctggactgagaacataggggaggagccctcccctccccagtgagacagcaactccaggctttcccgcttttagatgggccccatctggactctctcctgtactccagagtaaggctgtggggtgctcaggtgggctgcagcagttgccgtggggacatggatcaccagtgtggctagagccagtagaaacgtgcttcttagtcgttctgagtggagctcctgtgtcatccttccttcccccaactccctggttggggacaggtgctccgttgacctgtaggtgggagagagttgactcccactggcagcaagggctaccagaggggaccccagggagagtccagcttgcttggtttgctccttgaagagcagcttggaggtgggacagtcacaggcttctgactggggtgtgtgtgtagtgggggtggggctcttggcaggcagattgtcaccaatagcctttaagtctttggtctcctggccctggtcccacctgtccctcccctaggtgggaggggtggagagcaagtttcctgaggccttcccctgtgagggcaggaagtagatactttccttggggccagaggatgctttcacccccaaggtgtgtatatgtgggggaagggtggggccctaaagagcaggttcctgtttctgtgtgagtcccatgtgcttggtgggaggcgctgtgtgagaatgtacagggcaggaggaaacatagcagggctggggtgcagaggaggcccagagcagtgcactccagtctgcaggtactgcactgggcactggggagaccaacctggccccaggggcttccctgtggctgccttccagggcagtactaggtaaacaggtgcctgtgctgatgccatgttgctaggagtggaacggacaatcagccggagtactcaaggtgacccttggtctctgaatcctgaataacaaagagggtcagaaggaagagtgtcccaggccagtgctgaggccttgtggtggcgatgagctcagcctgttgaggcatggagcagagtgatgggagaggcacatgaggttgggggcctttgaggctgtggttgggaatcttgtattttctcaggatggagtgaagacctggagaggaggggctctggctgctgtgtggggatgaattgtgggaagagggtgcagcactggaccccttccctgccacccatccacgtgcatcatcagtgtaatctctgattggattcctaattggggaggtcttgcccatctctagtcagtaactcactgtttctaagcctcctggaccatggcccaattcttctcccagtgaggtggttgctcagagtgccgacccttccatagggagtgagcagtgcaaagaaggtgccccctcctgaaccttgaagtgtagccattagggttttccctggggggccttctcactaattgtactctggtgctgccagagagaaggttgtcagcttcccactgctaggtggcagtagatggtggcagccctctctttccagggcaaggtctggtggatgaggtgcacatggttaatgcagagcagcttaacatccaccacagagggtgagccctgggataatgtgttgggaggcgtctgcggagggtgaggaattgaagcagtcccagtctgctgtggcgtgcgtgcttggcaagcatcctgttgtggcagtggccactgatgtttgatcgtgaatgtttatcttgggactgtcttgctgggccgggcccataggtgtagctgagcattcgtggggaatggacgccagcagagttgtaccagggcagagaggtcagggcagagaggtcaagacagatggtccgggctggggagaagttgaagggtccttgtgccagtcctcccctttttgtgtgctacctcatcttgccactgcagtgactttgggcagagggtgggacagggaccttttaaaatttttaaatggcatttcagcctgtgctccagttctccatgtggcaggcactgtgctggctgtcttcccagacacttgttatcttgttcacttgttccacaacaacctgtgaaatagctgtgagctccattggatccatggatgaggaacctgagaccaggaagtcacctgcctgatgccacagctcatgtggcagcactgagacttgaaccagggaattgtgtctgcagaagtggctgggccatttcctttacctctcagccacctttctgccagctccctgatgacaaacatcccggggccctggccacagcattgtagggctgggtcaggggagtggcaactgtcaggcagaggaaagaaccctgtagacagagaaaccaagccctgcaatgagtcctgttagatctccaggagttggggctccagaacctcccaagttatgttctcagagagattaattgctaccgctgtaaacagcagtgtttattacccctgctgtacacatcaggcagttgaggcccattcaggtgttggaactggctagggttacccagcaaattatccttggagttggaattaggtctttctattcagactgtagcttttggctcctgttcggaggtctatgggacagataatttagtggggattctttgtagtccagggcagcagttcttaacattgctgcatggtagaattacctgggaagctttaccaatttcaggcccttccttaggccaggtacttcagaacctcagagctccccagggggctccactccacagccaagggtaagaattcctggtctagggctgtgaggccacctccttgcacacctgaaaatgtttaaattggtattattctactgaaatggctgaggtggggtttggggtatcttgaaacaaatcaaactctgttactaattgagccctagctgggtgccaggccccaggtatgtgtgttgggagggagtgggctcttgaggcccaggagctgaggtttctgatagacttggggatgggattttggctgaaaaagaaagtcttttggggcaggagcttggaacccttgacccaaggagtcatggggaagatggggcaaggaggggtgggaaaataggtaattcatggctgcttctctaagatgtgcctgcctagccccagtaaacctacctccctccatccctgccaggccatggtggcgtgttacccaggcaacgggctcgggtacgtaaggcacgttgacaatccccacggcgatgggcgctgcatcacctgtatctattacctgaatcagaactgggacgttaaggtaggggtgagggtgagggtgagggtggcgctggggctagggctggggcgggggtggcgtgcgtccactccattttccactctcagcccagattctggcattctcctgtttctcttctcaacacacagcgggcagtgcgatctgccggctcttcctgggaaatggcacctcctcctctctagcggactgtgtggtgggaactcccctctttccgggaatggtgctgtctgcccagccccacccggccttgtaatgaacactttcccccttttcctgtctttagtagcttcctgcccatctccatggtgatgcagtctctgggttgtcattcactttgagagcccgaggggtgggagggagtgatgcaggcagacgctgcgcctcctagtgggctcccggggcaccgtgggaggcagcggctcctggccgtaccagctagcctcatcctttggcctgcccccaggtgcatggcggcctgctgcagatcttccctgagggccggcccgtggtagccaacatcgagccactctttgaccggttgctcattttctggtctgaccggcggaacccccacgaggtgaagccagcctatgccaccaggtatgacctgtacttctggagacgcacccaggtgctccccctgtgacaatgtcctgtcagagcctcagagtgactagggagcgacgaagtattgagagggggcctaggtgggagcagaaccgggtggctcaaaaggatggccgcctagtgtgtgtggatatggtagctggaattgcagaaaactaatgtccaaccaccctggtctccaggtacgccatcactgtctggtattttgatgccaaggagcgggcagcagccaaagacaagtatcagctaggtacctgcttccctcccttcagtccttcctattctgtgggccctcttgggcctgatgccaccccatccccctcatcagcctcttgttaaatcccaccactcatttttcttcatctctgcccaccttccttagcccactctcctggtaccccaacaggagccccatttcttcctggtcctctccccatctccccaggtttccctggcttctttgtccttctgatgactcactgtctcctgtcccctctcacccccagcatcaggacagaaaggtgtccaagtacctgtatcacagccgcctacgcccacctagtggccagtcccagagccgcatggcagacagcttaaatgacttcaggagagccctgggcctgtgctggctgctccttccctgccaccgctgctgcttctgactttgcctctgtcctgcctggtgtggagggctctgtctgttgctgaggaccaaggaggagaagagacctttgctgccccatcatgggggctggggttgtcacctggacagggggcagccgtggaggccaccgttaccaactgaagctgggggcctgggtcctaccctgtctggtcatgaccccattaggtatggagagctgggaggaggcattgtcacttcccaccaggatgcaggacttggggttgaggtgagtcatggcctcttgctggcaatggggtgggaggagtacccccaagtcctctcactcctccagcctggaatgtgaagtgactccccaacccctttggccatggcaggcaccttttggactgggctgccactgcttgggcagagtaaaaggtgccaggaggagcatgggtgtggaagtcctgtcagccaagaaataaaagtttacctcagagctgcacacatctgactccatctgcaatttagggcctttattgaccgaggagggtatggaggtttgagggccagtgagcccaccatagtggagcctgacctcagcaggccactggctggagctggaagtctggggggacactgcccaggccagtgcactgcaggtgaggttgatggtgccagggcgtaccacagggagcaggcagaacctctgtaaggtggccgtaaggaataggaagatacccgagtgggccaggcctgtgcccaggcacatctgctttgccgggtacacaggtgcacagtgagcaccaggtaccccagagccagtccaggctggtccccttcctcctctgcctgcacctgaggcaaagggcatgaaagcatcattgccctggaacttgcccttgtccaggaagttggtagggttgaagcagtctgggtctttgaattgagtggggtcccggtgtgcagtcacaagcaggggaatcacaaaagtgccctggggatacatgcaacttgggttacctgcgggcttggtgagcacctgcaccacctccatccaagacgctttttaaaagcccaagggaataggccgggcaagtagctcacgcctgtaatcccagcactctgggaggctgaggacagatcacttgaggtcagaagttcgagaccagcctggccaacatggcgaaacctgtctctactaaaaatacaaaaattagccaggcgtggtggtgggtgcctgtaataccaggtactcaggaggctgaggcaggacaatcgcttgaacccaggaagtggaggttgcagtgagccaagatcatgccactgcattctagcctgaatgacagagccagactccgtctcaaacaacaacaacaaaaagcctaagggaaggcagagctgccttcctgctccaggggtaactgattgtgttttggtctgcacagcgcacacctgctgattctggctgatctcatgcacccgggtcccgcacgggatccccagactcagtgggtacctttgggcagacagtggctgtgcaggtgggtgtcgagggtgagggtgcgcggcagcccaggggcaccacgctgatgaagcactggatctcgagcagcactgcgttggcgtagggcaggcacacgcgatagtccaggcttggggcgggcctccaccctaccacagggtccagctcctgcaccttggctcaggccgggggaggctgtgagctgcgcacttccaggaccctccagccatccccagactgcagcctcccattctgggtctctccgggttgcacacctgccacctctaggtacttaagcagaatgaggagcccatagcacagggtggtgctcgtggtttcggtgacgccaaaaaaaaaatgcgtcgtcattaccgacgtctactcctggaaatggctctccgggtcctgctgttactgtgggcagaggagatgtgctgccgcgtgccaggcacctgttggtgggcggcatggatagagtttagagagctgggacccatgccttacccatctggtcaagcaatcaatgaaatcgcggggctccgctggctgccgcatctgccagtgtcgttgaatttgctcagagatgacccgcagctccgaaaagtttcggaagattcggtggtgcgggcccgggagccagtccatgagggacaggcaaatgtacatctggagagacagggtctgtctcaacatgggccctgcacaaggccactaggccttagtttccctacagggagattggactaggactttgatactggatgttctagaactcttccaggaatctgtcccattctaatgatccattgtaggtaggtctgtgtactcgggatttggcataaggctggacgcaccaaggaaagattgtggccggccctctcacctcgccccatctggaactaatgatgcagaagttgtcactgaagaggttcaggagcctcaggaactccgggtccccatagcgatagcggttcccgaagacaagaacagataacattggatacagcattatccagtagccgcacggggtcaaacggggctcctgggggtaggaacaggacggtggtcataacgcgtggtcctgcccccagccagccccatgggcttactggctttcttccacccaaataccttccagtggccccgtcttggcagtgcaagggactctcccacaccaggcccttccgctctcccggccaggccgaagcaatggtggcttgaaattcgtctagcagacaagccgcctcctccaggacgcgcgcctcgacggtccgcgtacccaacccgaacttcttaagcgctccaagtgcaaaattgcgcagtgtccaccagcacggccggttagaaaacaagattcctgtggtggggacgggaaaggaggcgggccggggagccggccacgccctatccaggaagcgccgggtcactggctacatccctttaggggcctccgactcctgcggccggcttcgttccctttgcttctttaccagacctccaagtgccctatccacacattggccccgcctttgctgggctccatccctgacctaggctggctctcgggctttgactcttaggctcttttctcctgttggctgcaggatgaacctccattctaaccttacgctttagcgccgccccgccctctctcggccgtttgcacctcattagctggagtctctattaggccccgcccccatttgcccgcctctaccatttacccgcccagcctggagcgtccgggccggcaagtccagcgccggggcctcactgtttccgcgtgtgaagcgttcgaagactgccatggacccgcggccagagaccgcatccgcctgtagcactaacgcgtcccgcagcgctgcgtagccgcacagccccaccgcagggcgcgggcccagccgcactgtgaacacccggccccagcggccggagagctacgggtagccggtgctcagcgggtgcccatagggttcctcatcggagccattgcccccagctccctcttccttcagacccaggagtcctcgtctcagaccctcattcctcaggcccaggaattcaaatccccagctccttcctccctgagatccaggagtccaggcccccacttccttcttcccttaggacctggaagtccagcttcccagcctcctgcaccctcagagtcgtctcctgggccctcagtactcagcctgcccaccctgaaccagaacagaccccctgctcccctcttcccacaacctgatttcctgctctgggctccttcgttacgacccagtgtcccggccccaggctctccactccctattctcctttcctagtactcagcagtccggagcactcatccttcctgtccttcctcaggatcatagagtacaaaccctcagctgtcttcattcaggaggagttctagtccccagccccaccttcacgaatccagaattccgttcccccattcctgtcgggaatggagtgcgcggtccaggcctccggactgcagctgcaagttccccagcaatgggagcggcctgggccggggaggtagggacccccgcatctgagcgcggcacccaccctacccccaccacgccggcgccagcaccagaagccacaacagcagcgcagcgatacccgcgacatgcctgcaattctccacgcctgcaccccttcacctctatttgatttccaaggggtcttaggggtggagcggggcggagacccgatgtgggaggagtgggcgtctccgggctgctcattccgtggattccccaacccgacgtctccaccccgcccccagccctagtggagctgtgccctggctccccctggctttttttgtgtgtctgcctcagcctgtcttacttagcaactttcgtgcaccagcattttcatggcaacacacctggacaacaggtgcaccctcctgagcccctagcacctttgagtccaatttacttggcctgtaagtgtgtattcctcaatctccgggccacctctgggtcccctgaacgctgtaccctgtacctctgattcctaaatacacaccgactctcaaatacaccacttctgttttttttttttcccttcttagagtttcactcttgttgcccaggctggagtgcagcagtgggatctcggctcactgcaacctccacctcccaggttcaagattctcctgtttcagcctcctgagtagctgggattacaggcatgcaccactaggcctggctaatttttgtatttttagtagagacggagtttcaccgtgttggccaggcagatctcaagctactgacctcaggtgatccgcctgcctcggcctcccgaggtgttgagactacaggccactgcgcctggctcaaatacacttctaaagacacccctggcattcctgtgctctgtgcctgtgattcctaggagctcacacctgagcccttgtcacttccattactcttaggaccctgtgtactatgcttgttccccagatctgccttcaatttccctggcttctgggtgtccatcagtctggcacttctgtgcctctccttagttcttcagggtgcctttctgcatgttgatccccttgtacctccatattatgtcctgccctgaatctaccatctctatccccaaggcactggctcccagatgcccccaaatgttctgtgcccatgctgctgaaccccctggtatccagtcccccaagtccctgtctgaggccaggccatgacgacagacaaacttatccctcattctctcatctatcccccccaacccccatcctagggcatgggctagagggggcagactctggcctggatgggccagggctgcggtggtgggagcagtgaggttggggctgtatttggaacagactgttcaggaatgtggtccaccctcctgcctgtccctgcttggccaaatccagccttcctccaagtgcctggcacagggcccagacctggggagatggtgggcggggggtggactgtgcagagcctaggactggcattgtctctgggagggtctctgtgtatctttgtttcatctctcagtcttgcttgctccctccctccaataaaaaagaaaaaaaaaaaaaaagaaaaaaaaaaaaaaaaaaaaaaaaaaaaaaaaaaaaaagaaca

SEQ ID NO: 1674 - DNA, 8165 bp, Homo sapiens
gctttcccctgcctgcctgtctctagtttctctcacatccctttttttttttcctttctctagccaccctgaagggtcccttcccaagcccttagggaccgcagaggacttggggaccagcaagcaacccccagggcacgagaagagctcttgctgtctgccctgcctcaccctgccccacgccaggcccggtggcccccagctgcatcaagtggaggcggaggaggaggcggaggagggtggcaccatgggcccgggcggtgccctccatgcccgggggatgaagacactgctgccatggacagcccgtgccagccgcagcccctaagtcaggctctccctcagttaccagggtcttcgtcagagcccttggagcctgagcctggccgggccaggatgggagtggagagttacctgccctgtcccctgctcccctcctaccactgtccaggagtgcctagtgaggcctcggcagggagtgggacccccagagccacagccacctctaccactgccagccctcttcgggacggttttggcgggcaggatggtggtgagctgcggccgctgcagagtgaaggcgctgcagcgctggtcaccaaggggtgccagcgattggcagcccagggcgcacggcctgaggcccccaaacggaaatgggccgaggatggtggggatgccccttcacccagcaaacggccctgggccaggcaagagaaccaggaggcagagcgggagggtggcatgagctgcagctgcagcagtggcagtggtgaggccagtgctgggctgatggaggaggcgctgccctctgcgcccgagcgcctggccctggactatatcgtgccctgcatgcggtactacggcatctgcgtcaaggacagcttcctgggggcagcactgggcggtcgcgtgctggccgaggtggaggccctcaaacggggtgggcgcctgcgagacgggcagctagtgagccagagggcgatcccgccgcgcagcatccgtggggaccagattgcctgggtggaaggccatgaaccaggctgtcgaagcattggtgccctcatggcccatgtggacgccgtcatccgccactgcgcagggcggctgggcagctatgtcatcaacgggcgcaccaaggtaaggctaggtgggggcctctttggaggggctttgcagcaccctggtttgcagcattcagtgctctgagcacagtgggtttggagacaggcttctgggaggtcacagaaggtttaggcagttcagtggagtgggtatgcttacttgtggggacttgggggggtctttatcctccctacgggccttaatgtgtgcacctgataagctaggagtttgtcctggagccacagtggttctttttttttttttttttttttcttttctttttttattgatcattcttgggtgtttctcgcagagggggatttggcagggtcacaggacaatagtggagggaaggtcagcagataaacaagtgaacagaggtctctggttttcctaggcagaggaccctgcggccttctgcgtgtttgtgtccctgggtacttgagattagggagtggtgatgactcttaacgagcatgctgccttcaagcatcgccacagtggttcttgactttgccaggaaccctcttaaactcatgagagctgctgacattcacagcgtggaccttggtggggttcatggcctcctggtgtcagtctgtggccccagaccaagcacggggatgtagataggcacacagttcacctggccgttctctgttgctgtctgtccctgtccacatccttccctgtgctcctgtcgtccatccctgtttgctggcccatgtttctagtccatccatcctgtctccaaggcaggagaagcagaagggggagggtggctgtgatgagtgagccctgggctgagggaaggaaaggggtgctgcccgctgggccgagtgcttggccctggactgcattgtgccctgggtccccactgtggcatctgcatcgaggacagtctcctgggggtggtactgggtggctgcctgttggcccaggtggagctcatccccatgtctcccacccttcactgtcccagtccctgccctccattccccctgtcctgtgtgtcacttcctccctacccatgtctgtctcttcctctgcctttatgtgtttgttcttagtccctttttctttttgctttagaacaatagttcttaatggtattttggagcctgggtctttttgagaatctgtcagaggccacagatcctctcttaagacaaatgctcatttgcttggagtttccgggcagttgtcaaggcctcatggcctccagctgcctgttcaggaacctggggtcaggagcccagcacaggacagtggtccatagggcctttccgggctgctgacaggatcattgtcttcatgggtggtgtgggggcctggccttgagtccaaggcttggtgtcctttggacaaggccctgtggggagtgcccactgctcaacacagtgatgcctggctggctgatggcacgggcagtgttgtgccctgcaggcgtgaggctgagctcctgatgtcctctgcctcctcctgcagatcccatcttgggttctgcttctgtgtggctttcctctcaggctggagctggctcagggaccagggctcccccggggccaaggcctgtttcctccccaccccagctggaacttgttctacttccctctccctcccgttacttgatagctgagccagagccggcccctccctgggcttggctcctgtgcgggcgggatcagtggcctccctggctcagcatcttcaccccaggttggctgtcgtcctcgtcagggggagaccagaagggctgagtggcccagatgggacactgctctgagcctcaatttgctgatccacggaatacgaaaaccaggttacatccccagtgagtctggcagtttggggaggggagagtaggagaagatctcttgtgttttggtgcctctggtgcccactttctatgtggttggggacagggccccagcgaggattggggaaggggcgtgtttggacttttttagccctaggtgaccttgattgtcctagggaagtaaggacaggccaggctggactgagaacataggggaggagccctcccctccccagtgagacagcaactccaggctttcccgcttttagatgggccccatctggactctctcctgtactccagagtaaggctgtggggtgctcaggtgggctgcagcagttgccgtggggacatggatcaccagtgtggctagagccagtagaaacgtgcttcttagtcgttctgagtggagctcctgtgtcatccttccttcccccaactccctggttggggacaggtgctccgttgacctgtaggtgggagagagttgactcccactggcagcaagggctaccagaggggaccccagggagagtccagcttgcttggtttgctccttgaagagcagcttggaggtgggacagtcacaggcttctgactggggtgtgtgtgtagtgggggtggggctcttggcaggcagattgtcaccaatagcctttaagtctttggtctcctggccctggtcccacctgtccctcccctaggtgggaggggtggagagcaagtttcctgaggccttcccctgtgagggcaggaagtagatactttccttggggccagaggatgctttcacccccaaggtgtgtatatgtgggggaagggtggggccctaaagagcaggttcctgtttctgtgtgagtcccatgtgcttggtgggaggcgctgtgtgagaatgtacagggcaggaggaaacatagcagggctggggtgcagaggaggcccagagcagtgcactccagtctgcaggtactgcactgggcactggggagaccaacctggccccaggggcttccctgtggctgccttccagggcagtactaggtaaacaggtgcctgtgctgatgccatgttgctaggagtggaacggacaatcagccggagtactcaaggtgacccttggtctctgaatcctgaataacaaagagggtcagaaggaagagtgtcccaggccagtgctgaggccttgtggtggcgatgagctcagcctgttgaggcatggagcagagtgatgggagaggcacatgaggttgggggcctttgaggctgtggttgggaatttgtattttctcaggatggagtgaagacctggagaggaggggctctggctgctgtgtggggatgaattgtgggaagagggtgcagcactggaccccttccctgccacccatccacgtgcatcatcagtgtaatctctgattggattcctaattggggaggtcttgcccatctctagtcagtaactcactgtttctaagcctcctggaccatggcccaattcttctcccagtgaggtggttgctcagagtgccgacccttccatagggagtgagcagtgcaaagaaggtgccccctcctgaaccttgaagtgtagccattagggttttccctggggggccttctcactaattgtactctggtgctgccagagagaaggttgtcagcttcccactgctaggtggcagtagatggtggcagccctctctttccagggcaaggtctggtggatgaggtgcacatggttaatgcagagcagcttaacatccaccacagagggtgagccctgggataatgtgttgggaggcgtcctggggagggtgaggattgaagcagcccagtctgctgtggcgtgcgtgcttggcaagcatcctgttgtggcagtggccactgatgtttgatcgtgaatgtttatcttgggactgtcttgctgggccgggcccataggtgtagctgagcattcgtggggaatggacgccagcagagttgtaccagggcagagaggtcagggcagagaggtcaagacagatggtccgggctggggagaagttgaagggtccttgtgccagtcctcccctttttgtgtgctacctcatcttgccactgcagtgactttgggcagagggtgggacagggaccttttaaaatttttaaatggcatttcagcctgtgctccagttctccatgtggcaggcactgtgctggctgtcttcccagacacttgttatcttgttcacttgttccacaacaacctgtgaaatagctgtgagctccattggatccatggatgaggaacctgagaccaggaagtcacctgcctgatgccacagctcatgtggcagcactgagacttgaaccagggaattgtgtctgcagaagtggctgggccatttcctttacctctcagccacctttctgccagctccctgatgacaaacatcccggggccctggccacagcattgtagggctgggtcaggggagtggcaactgtcaggcagaggaaagaaccctgtagacagagaaaccaagccctgcaatgagtcctgttagatctccaggagttggggctccagaacctcccaagttatgttctcagagagattaattgctaccgctgtaaacagcagtgtttattacccctgctgtacacatcaggcagttgaggcccattcaggtgttggaactggctagggttacccagcaaattatccttggagttggaattaggtctttctattcagactgtagcttttggctcctgttcggaggtctatgggacagataatttagtggggattctttgtagtccagggcagcagttcttaacattgctgcatggtagaattacctgggaagctttaccaatttcaggcccttccttaggccaggtacttcagaacctcagagctccccagggggctccactccacagccaagggtaagaattcctggtctagggctgtgaggccacctccttgcacacctgaaaatgtttaaattggtattattctactgaaatggctgaggtggggtttggggtatcttgaaacaaatcaaactctgttactaattgagccctagctgggtgccaggccccaggtatgtgtgttgggagggagtgggctcttgaggcccaggagctgaggtttctgatagacttggggatgggattttggctgaaaaagaaagtcttttggggcaggagcttggaacccttgacccaaggagtcatggggaagatggggcaaggaggggtgggaaaataggtaattcatggctgcttctctaagatgtgcctgcctagccccagtaaacctacctccctccatccctgccaggccatggtggcgtgttacccaggcaacgggctcgggtacgtaaggcacgttgacaatccccacggcgatgggcgctgcatcacctgtatctattacctgaatcagaactgggacgttaaggtaggggtgagggtgagggtgagggtggcgctggggctagggctggggcgggggtggcgtgcgtccactccattttccactctcagcccagattctggcattctcctgtttctcttctcaacacacagcgggcagtgcgatctgccggctcttcctgggaaatggcacctcctcctctctagcggactgtgtggtgggaactcccctctttccgggaatggtgctgtctgcccagccccacccggccttgtaatgaacactttcccccttttcctgtctttagtagcttcctgcccatctccatggtgatgcagtctctgggttgtcattcactttgagagcccgaggggtgggagggagtgatgcaggcagacgctgcgcctcctagtgggctcccggggcaccgtgggaggcagcggctcctggccgtaccagctagcctcatcctttggcctgcccccaggtgcatggcggcctgctgcagatcttccctgagggccggcccgtggtagccaacatcgagccactctttgaccggttgctcattttctggtctgaccggcggaacccccacgaggtgaagccagcctatgccaccaggtatgacctgtacttctggagacgcacccaggtgctccccctgtgacaatgtcctgtcagagcctcagagtgactagggagcgacgaagtattgagagggggcctaggtgggagcagaaccgggtggctcaaaaggatggccgcctagtgtgtgtggatatggtagctggaattgcagaaaactaatgtccaaccaccctggtctccaggtacgccatcactgtctggtattttgatgccaaggagcgggcagcagccaaagacaagtatcagctaggtacctgcttccctcccttcagtccttcctattctgtgggccctcttgggcctgatgccaccccatccccctcatcagcctcttgttaaatcccaccactcatttttcttcatctctgcccaccttccttagcccactctcctggtaccccaacaggagccccatttcttcctggtcctctccccatctccccaggtttcccttggcttctttgtccttctgatgactcactgtctcctgtcccctctcacccccagcatcaggacagaaaggtgtccaagtacctgtatcacagccgcctacgcccacctagtggccagtcccagagccgcatggcagacagcttaaatgacttcaggagagccctgggcctgtgctggctgctccttccctgccaccgctgctgcttctgactttgcctctgtcctgcctggtgtggagggctctgtctgttgctgaggaccaaggaggagaagagacctttgctgccccatcatgggggctggggttgtcacctggacagggggcagccgtggaggccaccgttaccaactgaagctgggggcctgggtcctaccctgtctggtcatgaccccattaggtatggagagctgggaggaggcattgtcacttcccaccaggatgcaggacttggggttgaggtgagtcatggcctcttgctggcaatggggtgggaggagtacccccaagtcctctcactcctccagcctggaatgtgaagtgactccccaacccctttggccatggcaggcaccttttggactgggctgccactgcttgggcagagtaaaaggtgccaggaggagcatgggtgtggaagtcctgtcagccaagaaataaaagtttacctcagagctgcacacatctga

SEQ ID NO: 1675 - DNA, 1182 bp, Homo sapiens
ccatctgcaatttagggcctttattgaccgaggagggtatggaggtttgagggccagtgagcccaccatagtggagcctgacctcagcaggccactggctggagctggaagtctggggggacactgcccaggccagtgcactgcaggtgaggttgatggtgccagggcgtaccacagggagcaggcagaacctctgtaaggtggccgtaaggaataggaagatacccgagtgggccaggcctgtgcccaggcacatctgctttgccgggtacacaggtgcacagtgagcaccaggtaccccagagccagtccaggctggtccccttcctcctctgcctgcacctgaggcaaagggcatgaaagcatcattgccctggaacttgcccttgtccaggaagttggtagggttgaagcagtctgggtctttgaattgagtggggtcccggtgtgcagtcacaagcaggggaatcacaaaagtgccctggggatacatgcaacttgggttacctgcgggcttggtgagcacctgcaccacctccatccaagacgctttttaaaagcccaagggaataggccgggcaagtcatcacgcctgtaatcccagcactctgggaggctgaggacagatcacttgaggtcagaagttcgagaccagcctggccaacatggcgaaacctgtctctactaaaaatacaaaaattagccaggcgtggtggtgggtgcctgtaataccaggtactcaggaggctgaggcaggacaatcgcttgaacccaggaagtggaggttgcagtgagccaagatcatgccactgcattctagcctgaatgacagagccagactccgtctcaaacaacaacaacaaaaagcctaagggaaggcagagctgccttcctgctccaggggtaactgattgtgttttggtctgcacagcgcacacctgctgattctggctgatctcatgcacccgggtcccgcacgatccccagactcagtgggtacctttgggcagacagtggctgtgcaggtgggtgtcgagggtgagggtgcgcggcaccccaggggcaccacgctgatgaagcactggatctcgagcagcactgcgttggcgtagggcaggcacacgcgatagtccaggcttggggcgggcctccaccctaccacagggtccagctcctgcacct

SEQ ID NO: 1676 - DNA, 1186 bp, Homo sapiens
ccatctgcaatttagggcctttattgaccgaggagggtatggaggtttgagggccagtgagcccaccatagtggagcctgacctcagcaggccactggctggagctggaagtctggggggacactgcccaggccagtgcactgcaggtgaggttgatggtgccagggcgtaccacagggagcaggcagaacctctgtaaggtggccgtaaggaataggaagatacccgagtgggccaggcctgtgcccaggcacatctgctttgccgggtacacaggtgcacagtgagcaccaggtaccccagagccagtccaggctggtccccttcctcctctgcctgcacctgaggcaaagggcatgaaagcatcattgccctggaacttgcccttgtccaggaagttggtagggttgaagcagtctgggtctttgaattgagtggggtcccggtgtgcagtcacaagcaggggaatcacaaaagtgccctggggatacatgcaacttgggttacctgcgggcttggtgagcacctgcaccacctccatccaagacgctttttaaaagcccaagggaataggccgggcaagtagctcacgcctgtaatcccagcactctgggaggctgaggacagatcacttgaggtcagaagttcgagaccagcctggccaacatggcgaaacctgtctctactaaaaatacaaaaattagccaggcgtggtggtgggtgcctgtaataccaggtactcaggaggctgaggcaggacaatcgcttgaacccaggaagtggaggttgcagtgagccaagatcatgccactgcattctagcctgaatgacagagccagactccgtctcaaacaacaacaacaaaaagcctaagggaaggcagagctgccttcctgctccaggggtaactgattgtgttttggtctgcacagcgcacacctgctgattctggctgatctcatgcacccgggtcccgcacgggatccccagactcagtgggtacctttgggcagacagtggctgtgcaggtgggtgtcgagggtgagggtgcgcggcagccccaggggcaccacgctgatgaagcactggatctcgagcagcactgcgttggcgtagggcaggcacacgcgatagtccaggcttggggcgggcctccaccctaccacagggtccagctcctgcacct

SEQ ID NO: 1677 - DNA, 4048 bp, Homo sapiens
gcagtgacgagggaaacctctcgctgagggttggggcaaagtcacccctggaaatcgaaggggccgctggtggtctcttgaggtccaccagcctcaaatgcatctcttcagacggtgttgggggcacaaccctactccccgaaaagtcgaaaacccaattcagttcctgcgagtccctcttagaatccagaccgagcatggggagaaaactgagctctccgaccacacccagggacatgctgttgtcgcccacactgcgtcctcggaggcggtgtctggagtcctctgtggacgatgcgggctgtccagaccttggaaaggagccgcttgttttccagaaccgccagtttgcccacctgatggaggaacctctaggcagtgacccattcagctggaaactcccaagcctcgactacgaacgcaagaccaaagtggacttcgatgacttcctcccagctatccggaagccccagacacctacctccttggctggatcagccaaaggtgggcaagacggttcacagcgttcaagcatccactttgaaacggaagaggctaaccgttcctttctctcggggatcaagaccattttgaagaagagcccggagcccaaggaggatcccgctcacctgtctgactcgtcctcatcctccggctccatcgtgtccttcaaaagtgctgacagcatcaaaagtcgaccaggaatcccacgacttgcgggtgacggtggcgagcgaacgtcccccgagcggagagagccagggacggggaggaaagacgacgatgttgcgagcataatgaagaaatacctccagaagtaggaaccagttcaggtaaaagcaacaggctggggctattcttgggggaatgagagttcaccttgcagccttggggagagcaggtgccactactgtccttaatgccacaaccgatttctctagagaccaagatttttagaggttttagctgaagtcatgtgttgatggatgcaaagcttttcagaacccctctgctgggtacctctacttccttgtactttgaaatgcagacacatcagaaagtaagaggttcctgtgggataccgctaaagaaggtgccagatgtagccgggcgcggtggctcacgcctgtaatcccagcactttgggaggccaaggcgggtggatcacctaaggtcaggagtttgagaccagactggccaacagggtgaaacctcgtctctactaaaaatacaaaaaattagccaggtgtcttgacgggcgcctgtaatcccagctactcaggaggctgaggcaggacaatcgcttgaaccagggaggcagaggttgcagtgagctgagggtgccaccactgcactccagcctgggaaacaagagcaaaactctgtctcagggaaaaaaaaaaaaaaaaggtgccagatgtttaaagttacctcaccctactgtcattttcttttcttaatgtcattccacctgggtttgaaggagctgtgatggcgttctgtccacataatgacagaagatccgtggtgggatcacagacatgcaaagggccaagttggaagagaccttcagaatagtggagtccacttgcattgcatatggagagaaactgaggccctaggttcaggggggagggaacaagtacaaaaatcacagagcaacaatgcaggataagtaactacttgctgcccttcctccctctcctagcactcatcctgccactcatctggagtcaaggtaagaagaggaattcaggccgggtgcggtggctcacgcctgtaatcccagcactttgggaggccgaggcgggcggatcacgaggtcaggagatcgagaccatcctggctaacacagtgaaaccccatctccactaaaaaaaaatagcagagcgtggtagcgggtgcctgtagtcccagctactggggaggctgaggcaggaaaatggcatgaacccgggaggcggagcttgcagtgagccgagatctcgccactgcactccagcctgggcgacagagcgagactccgtctcaaaaaaaaaaaaaaaaaaaaaattcattgctaaccaaggcttacatttattgagaggacacatcagacagtcatttagtactcctgatatccccaagcagtggtgaatgttatttattcccatttaccaggttgacagactgagtatcagaaagattaaagtcacttgtacagaatcaccagggcataattgggtttccagctctagaatccctacatttatctttaaaagttttccctagggacacattccaggcatcttcatgagtgaaattagagctgtctgatagcgtatgagccttcgtaaatctcccagtcactgaatctcagaacttgctgcagctcaaggctctgatggtccagcgactgcacatggctctcagggtgcacctgctgccacccccaggcctccttgacccaaatgaggcacacgtcctctatttctttgagagacagcctcagcccatcaaaaagccattgccccttccgtggagacaggtttggactctatcagagcaaactaatttgacttaacatggccttctctctgctctcaattaccgagtaaagatctgatattcatttacattattatgctctcggggacacagaaagcagtttcaaaggccaagtaaagggcacacatccatgaggggaacagtccttagcagaagtcatcacagaacatcttgtctctgccattccgttttaaactcaagtcctccttccctaccctgagcaaggttcttctccaaggatgctagtttttcagctatacaatgcaacacctccaacgatgcaaatgcatggtgggctttggaaccaaacaagaccccccaaagctcagttctgccctgtaactagccattggaccctaggcaagtgatacagtctcaccaagcccctgtgtcctcagttggaaaacaggggtaagaataccaactacctaaagtaacgctgtggatttcatgagaatatgagagattcctggaatagagcatggcaccccatggatgcagtaaatgccaggttactttggaatttttggacctttgggaaatctatcccaactttttctccttctgccacctacactctgccatccctttctgtggagttgctacagtaacgccacctgggtatacagaattccaggccctccaccccattcattgtctctatcaaaatgtacccatcttcctggccaggcacagtggctcatgcccataatcccagttctttgggaggctgaggcaggaggatcacttgaggccaggagtttgagaccagcctgggcaacatagtgagtccccacctctacaagaaatacaaaataaaaaattagctgggtgtagtgacatgcacctgtaatcctagctacttgggaggctgaagcaggaagatcacttgaacccaggagctggaggctgcagtgagctatgattgcaccactgcacactagcctgagtgacaaagtgagaccctgcctccagaaaaagaaaaaccttacccatcctttgtcccattcatcaactctgacctatgtttgcttccagcctccttgaagctgcccttgaagacttcccgactctacaataacttggagacagagagactggccaggcctccccggtggccagagccagccagcatggccaccctcaagaggcgagatgagcccacagaggcatatcctgcggggatgctgggctcccagtgtggttggcctgaacaaaataaagtgttgactcctgggcatctgtgccttctctatggccttgctacctgggattccagagagttgatggggtgcagataggggtaggactgttagaatagaaccaacccaaactgtgtgtagtttggggtgtatacttctatttctcttcctacatgtctacatgccatgaccttcctcctcctcttcacttggccagtttcagctcacttcctccaggaagtctttcctgatatatcaaactgaaacaaatgctcctcctccatgctcccttaatcccc

SEQ ID NO: 1678 - DNA, 163 bp, Homo sapiens
ggcgaagtgcttgccgtccagagaaagtccacagagagattagaacctgcttcctctcccctggcttctcggagtacaaatacatccccgctgtcgagggaaaagctgcccagtccttcagcggccctctcggagttcgtggaagggctccggaggaagagag

SEQ ID NO: 1679 - DNA, 1786 bp, Homo sapiens
gatggacatttgagttgctgccaccttttggctattgtgaatggtgttgctgtgaactttggcttacaagtatctgagtccctgctttcagttcttttgagtggaatttgctggatcatatggtaattccgtgtttaacttttggaggaactgccaaactgttttctaccgtggctgtaccattttatattcccaccaaccattgatttagtttgacttctgttgtttaaagaagtatatctgaattttacacatactccaaaactgtaattatttgaattaattggagtagaaattaatttgaaataatgaaatgtctgattactggacatcaaaagctgctttgcattaggccatggttctcagaattcacaatcctcctttccattttttcctccctccctcccttcctcctctcgctaccatggtcactctcagcttcacaataagcacgtgtatcttagggcatttgaacttcaaatactacagcacctcacacgtaagaactctgtaacagtagacctctatttccctttcctgtcctatgtgctacttttttgttttgtttttttgagacagggtcttgctttgttgcccaggcaggagggcagtggcgtaatcacagctcactgcagcctcaacctcctgtttaagcgatcctcccacttctacctgccaagtagctaggactacagatgcagaccaccatgcccggctaatttttgtatttgtagagacagggtctctccacggtgccctggctggtcttaaattcctgagtttgtgcgatctgtccacctcggcctccaaaatgctggggttacaggcatgagccactgtgcctggcctttgtatttttgtcatacattttatttcccagtattatagactccagaatatgttgttgttattgttttaaaagtcagttatcttcttagttttctttcagaaaaattaaatggtgagtttttttgtttgtttgtttgtttgttttgcatggcccatgtatttaccattcctggtgctcttccttcttttgtgtggattcagttttccatctagtatcattttcgttctggtaaaagcatgtttgacatttcctgtagtattgctttgctggtgacacattcttcctcagcttttgtctgaaatgcctttatttcaccatcatttttgaaggatgtttttgctgggtatagaattctaggttggtagtttttgttatttttcagcatttttaaggtgacatttggcttgtacatgttgttcttgagaattctgcagttattctttgttccactgtatgtaataatatatgtttttctcctttctctgattttacggtttttctctttgttgctgatattctgaaacttgactatgatgtgtctttgtgtggttttctttgtggtttttttcctgtggaatttattcaacttctgggatctgtaggttatagttttcacaaattggaaatttttgacattacttcttcagacactttttctgtcttcccctccatcattctgggatttgaattacatgtatacagtaactgttgttgtttcataggtgactaactgggtaggggaatgtctggttcccttactatccggtgaagtagcagaaccaccttttgtaggaatcagttatcaggccctttactttcccttgaactctaggctagttccagaacctttggtggactggaaagaggaaatagttatgccacaatttttagtacatgcaaatgtacatgtaatgtttaaaaaaaaaaaacaacaaa

SEQ ID NO: 1680 - DNA, 141 bp, Homo sapiens
cggagcctcactctgtcacccaggctggagtgcagtggtgccatcttggctcactgcaccctccacctccagggttcaagcgattttcctgcctcagcctcccgagtagctgggattacaggcgttcgctaccacacccag

SEQ ID NO: 1681 - DNA, 1413 bp, Homo sapiens
ttctgggaaggggtgtgatgcattaaggagatggtgtctgcatggtgccaccgcaggccatggccagctggatctgtgtcttctgcaccagcccatctggatgcagtgcaacctgtctggtctgctatcctgcgttcccctaactggcaccctcctgggccagccagcagcaggacatagaccaaggccaacctcctccacacccagggcctctgccttctaccctctgtggagtctccattaacttggcattgacagggctgcttgactcaaaacaaccccagccctgccctgaagccatctcgccagtcagtcagagctcaagactctctctttctctggagaagagcaggaaagtaatcccagctaaccctcatgcagccaccactctgtgtcagaatctcttctaggccattgcattgaataagtcatttaatccatataaacctgcaaggagtaggtgatattgttaaccccattttataggcgaggaaactgaggcatggtgaggttaagtgaccagcaaggtggaaatctgaggtttgacccatctcctggtgtggagtccagttctctcagcttcactgatccttcctgatttgtgctgagttagggaccccttgggaagcccccatgggcagggggtgctggtgctagcatttcctgtggattatgggagggggatgtgtggaggacctgtgtctactgttcctctagcctctgggggatttggagaacccactctgcccagagatgtaagtcatctttggatatagatgagacttgttccccctccccctgaatcccagggcacagctctatggaataagctctagctggaacttgtaaagtttggcccagccctccctgggaggctaggaggtggggaagagccaggagactcgaagtggtggtggtagttaatgtctatgtggttagacgttaaccagttactctgtggtgccaggcactgtcctaggcacgctatagttatcattgtctcctttggtgcccccagacagcccagggtcaagacaggtagcctcagtttacagatgcagcagtggaggcttgcacaatgagtaggtggctttgttcaaatcacagacctaggccaggtataaaagcctaagtgtggtgtaattccagcactttgggaggccaaggcggggagattgcttgagtccaggagtttgacaccagcctgggcaacatagtgagaccctgtctctacaaaaaaaaaaaaaaaagaagaagaaaagaaaagaaaaattagcctggcatggtggcatctgcctgtagtcccagctactcaggaggctgaggcaggaagatcacttgagccagggaatgtttgaggctgcaatgagctgtaatcacaccactgcactccagcatgggcgacagagtctc

SEQ ID NO: 1682 - DNA, 1411 bp, Homo sapiens
ttctgggaaggggtgtgatgcattaaggagatggtgtctgcatggtgccaccgcaggccatggccagctggatctgtgtcttctgcaccagcccatctggatgcagtgcaacctgtctggtctgctatcctgcgttcccctaactggcaccctcctgggccagccagcagcaggacatagaccaaggccaacctcctccacacccagggcctctgccttctaccctctgtggagtctccattaacttggcattgacagggctgcttgactcaaaacaaccccagccctgccctgaagccatctcgccagtcagtcagagctcaagactctctctttctctggagaagagcaggaaagtaatcccagctaaccctcatgcagccaccactctgtgtcagaatctcttctaggccattgcattgaataagtcatttaatccatataaacctgcaaggagtaggtgatattgttaaccccattttataggcgaggaaactgaggcatggtgaggttaagtgaccagcaaggtggaaatctgaggtttgacccatctcctggtgtggagtccagttctctcagcttcactgatccttcctgatttgtgctgagttagggaccccttgggaagcccccatgggcagggggtgctggtgctagcatttcctgtggattatgggagggggatgtgtggaggacctgtgtctactgttcctctagcctctgggggatttggagaacccactctgcccagagatgtaagtcatctttggatatagatgagacttgttccccctccccctgaatcccagggcacagctctatggaataagctctagctggaacttgtaaagtttgcccagccctccctgggaggctaggaggtggggaagagccaggagactcgaagtggtggtggtagttaatgtctatgtggttagacgttaaccagttactctgtgtgccaggcactgtcctaggcacgctatagttatcattgtctcctttggtgcccccagacagcccagggtcaagacaggtagcctcagtttacagatgcagcagtggaggcttgcacaatgagtaggtggctttgttcaaatcacagacctaggccaggtataaaagcctaagtgtggtgtaattccagcactttgggaggccaaggcggggagattgcttgagtccaggagtttgacaccagcctgggcaacatagtgagaccctgtctctacaaaaaaaaaaaaaaaagaagaagaaaagaaaagaaaaattagcctggcatggtggcatctgcctgtagtcccagctactcaggaggctgaggcaggaagatcacttgagccagggaatgtttgaggctgcaatgagctgtaatcacaccactgcactccagcatgggcgacagagtctc

SEQ ID NO: 1683 - DNA, 498 bp, Homo sapiens
gctgacccagagttctgaaaggtcaggggagtctggagggtgaggagaagctctgccccggaggtgacatttgaactagtctctgaagcgccagagttctccccaaaggaaggaggtcattcaagaatgaggaaacagggcgcccaggcgatgggctgtggtgtgtcctgggagcagccaatgatcagcagagtagaggcagcgagtgttgacccccatagcaaaaaatgagtgctggggtctggagtcctccctcctccttaaccctcctctgttatcaaagactcaaggttaactcaccttacgtcttctccctacaagtcaggctcagggaggggagcagataccctgcttgaggacccccaggaaaccagttcctctttccttcttgtggagggagtgcctgggctctgggcagggaagacccccacagagggtggagtccagctccaggagaggcagcctgggcagggaggggctgctctcccggctgggcgt

SEQ ID NO: 1684 - DNA, 498 bp, Homo sapiens; identical to SEQ ID NO: 1683

SEQ ID NO: 1685 - DNA, 5088 bp, Homo sapiens
  misc_feature (5)..(304): n equals a,t,g, or c
  misc_feature (3943)..(4892): n equals a,t,g, or c
tattnnnnnnnnnnnnnnnnnnnnnnnnnnnnnnnnnnnnnnnnnnnnnnnnnnnnnnnnnnnnnnnnnnnnnnnnnnnnnnnnnnnnnnnnnnnnnnnnnnnnnnnnnnnnnnnnnnnnnnnnnnnnnnnnnnnnnnnnnnnnnnnnnnnnnnnnnnnnnnnnnnnnnnnnnnnnnnnnnnnnnnnnnnnnnnnnnnnnnnnnnnnnnnnnnnnnnnnnnnnnnnnnnnnnnnnnnnnnnnnnnnnnnnnnnnnnnnnnnnnnnnnnnnnnnnnnnnnnnnnnnnnnnnnnnnnnnnnnnnnntgagatagaatctcactctgttgcccaggctggggtgcagtggtgcgatctcagctccccacaacctctgcctccagggttcaagcaattctcctgcctcagcctcctgagtatctgggattacaggcatgcaccactacgcttggctaatttttgtatttttagtagagacggggtttcaccatgttggccaggctggtcttgaactcctgacctcaggtgattcgcccgccttggcctcccaaagtgctgggattacaggcatgagccaccgtgcctggctgaaagttcattttcaatagcatagtccagaccattttttttctaaatgtgctaccagaatcaaagaaataataacattccattaaaacaaataaaatggcattaaattaaatgttctgcataatttaagagccctgaccaattttagtcttttttttttttttgagacagagtctcactgtgtcgcccaggctggagtgcagtggtacgatcttggctcactgcagcctccacctcctgggttcaagtgattctcctgcctcaacctcccgagcagctgggattacaggcatgtgccaccatacctggctaatttttatatctttagtagagatggggtttcaccatgttggccaggctggtctcaaactcttgacctcaggtgatctgcccgcctcggcctcccaaagtgctggcattacaggcatgagtcactgcgcctggcctagtctattattaacaaataaaaattttaatacataaaaatggatggatattttctagagccttaattaagtaattcactccaaatgtcttttttttttttttttttagctagtaagtggagacactttgaaacatggtgcttaaaaaaaaacacactacctacctggtgggctgtttcatggtgaaataacttattctgtataatttgaatgcaattcagatactatgtagatgttaaaaagctaagttaacataaaatgtacatcatgaaacgtcaccttacttgacggcattaatacattttttccactaaaatacttgtaaccatggccatcagtatgaagaaaaattttaaacacgatgaaaggtggaaacgtttcacctctaaatctgaaataaagataaaaatttagttatttggcatcaggttttgggctcagttgcttttcccccttatacttaagatagttcatatagtttcttgcatacagggtaaaggctatgtcagagcatgtaaagaactggtaatgaaatggatcacataggatgtaagacccacactttggtgtactcacaactattctcatacctgtgtaagactgaatacagaatgggagatgagagctactctcatggcaacttttagccacagagtcatgcctcggtttctttacataacaaatgtaaataagaataacacatttactttgtaattaagttctgagaagttacaagaatttaaaaaatccatatctaagatttcctcatattaactaagtacttcttgaaataaatcagcatagatacattacctgaatctaattttacactgcatagtaggatccttaataagcttagcctctaagggggccactttcttcagtatttcatgtgttacatagaattcctgaaataaaggacagtgctgtaaaaggaaagcagtatcccacccagacacaatttatggactataacagaggcaacgtggtaaagtgaacattatgctggacttggagttctgaaggggtgggtttttgttttggcacctccacttactatctgtgtagccttgagccagttacttaatcattttggcctccaactttggttatctgtcccttttagagatcaaaggcactattatttccctatgacagcacttttcacaatatattataattacttatcaacttgtctgtgcctcctactagactgtaagcttcatgaaggtagggatggtggcttttctctttaccactatattcctagcatctaatacagtgcctggaacacagcagatgcttaagaagtatttgttgaatgaatcactgtaagatgaggatgataatagtaataagttactagcttttaagcaccttttatgtaccatatactactatgttaggtgccttatatacattagctcatttaatccttacatcagcaacactatgagaattttttgtttgttttgagacagagtctcgctccgtcgcccaggctcgagtgcggtggcatgatctcggctcactgcaacctccgcctcccaggttcaagcgattctcctgcctcagcctcccgagtagctgggactacaggcacctgccaccacgcccggctaattttgtattttttcagtagagacggggtttcaccatattggccaggctggcctggaactcctgaccttgtgagccgcacgcctcagcctcccaaagtgctgggattacaggtgtgagccaccactcaggctgcagtgcaatggcatgatctcggctcaccgcaacctccacctcccaggttcaagtgattctcctgctcagcctcctgagtagctggaattacaggcatgcgccaccatgcctggctaattttgtatttttaatagagatggggtttcttcatgttggtcaggctggtctcgagctcccgacttcaggtgatccacccgcctcagcctcccaaagtgctgggattacaggcgtgagccactgcacctggcccattatgagaatattatcacgcctattttacagatgagaaggctgaggctcagggaatttttgtaatttataaaaaggcatacaggtagtgaatggggaagccaggattcatttagttctgtttgactctaaagtcccaactctttcccccaaacaaccccaaccaaccccgttatgcctatgataatcacataaaaatgtacactaaagagcttttaggctgggcactgcggctcacgcctataatcctggcactttgggaggccaaagcgggaggatcacctgaggtcaagagttcgagaccaacctggtcaacatggtgaaaccccatctctactaaaaatacaaaaattagccaggcgtgatggcaggcgcctgtagtccaagctatttgggaggctgaagcaggagaatcgcttgaacccgggaggcagaggttgcagggagccgagatcgtgccactgcactccagcctgggtgacagagcaagactctgctcaaaataaataaataaatagcttttaaaaggacaaagcattattaatttaaggtattaaagtattactataacagataaaaaagaatttccttctgttacaaaagtctaaaaatactatgaaaccagcattataaaattaaatacaagttccatattcaaagacaatggataatagacctgaaatgccaggagtttacctgggtgggttttctctgaagtattcagacggagtcttgctctgtcgcccaggctggagtgcagtggctcaaactcggctcactataacctccacctccccggttcaaggtagctgggattacaggcgcacaccaccatgcccggctaatttttttgtatttttaggagagacggggtattcaccatggtgaccggactggtctcgaactnnnnnnnnnnnnnnnnnnnnnnnnnnnnnnnnnnnnnnnnnnnnnnnnnnnnnnnnnnnnnnnnnnnnnnnnnnnnnnnnnnnnnnnnnnnnnnnnnnnnnnnnnnnnnnnnnnnnnnnnnnnnnnnnnnnnnnnnnnnnnnnnnnnnnnnnnnnnnnnnnnnnnnnnnnnnnnnnnnnnnnnnnnnnnnnnnnnnnnnnnnnnnnnnnnnnnnnnnnnnnnnnnnnnnnnnnnnnnnnnnnnnnnnnnnnnnnnnnnnnnnnnnnnnnnnnnnnnnnnnnnnnnnnnnnnnnnnnnnnnnnnnnnnnnnnnnnnnnnnnnnnnnnnnnnnnnnnnnnnnnnnnnnnnnnnnnnnnnnnnnnnnnnnnnnnnnnnnnnnnnnnnnnnnnnnnnnnnnnnnnnnnnnnnnnnnnnnnnnnnnnnnnnnnnnnnnnnnnnnnnnnnnnnnnnnnnnnnnnnnnnnnnnnnnnnnnnnnnnnnnnnnnnnnnnnnnnnnnnnnnnnnnnnnnnnnnnnnnnnnnnnnnnnnnnnnnnnnnnnnnnnnnnnnnnnnnnnnnnnnnnnnnnnnnnnnnnnnnnnnnnnnnnnnnnnnnnnnnnnnnnnnnnnnnnnnnnnnnnnnnnnnnnnnnnnnnnnnnnnnnnnnnnnnnnnnnnnnnnnnnnnnnnnnnnnnnnnnnnnnnnnnnnnnnnnnnnnnnnnnnnnnnnnnnnnnnnnnnnnnnnnnnnnnnnnnnnnnnnnnnnnnnnnnnnnnnnnnnnnnnnnnnnnnnnnnnnnnnnnnnnnnnnnnnnnnnnnnnnnnnnnnnnnnnnnnnnnnnnnnnnnnnnnnnnnnnnnnnnnnnnnnnnnnnnnnnnnnnnnnnnnnnnnnnnnnnnnnnnnnnnnnnnnnnnnnnnnnnnnnnnnnnnnnnnnnnnnnnnnnnnnnnnnnnnnnnnnnnnnnnnnnnnnnnnaaaaaaaaaattagctgggcatggcggcacgcacctgtagtcccagctactagggaggcggaggcaggataatcccttgaacctgggtggtggaggttgcagtgagccaagatcatgcccctgcactccagcctgggcaacagagtgagacttcatctcaaaaaagaaaagaaaaaaaagagtatcactaataata

SEQ ID NO: 1686 - DNA, 1191 bp, Homo sapiens
aaaaaatgtaagctgaaatgatgacgtgttcttttagaaggtttatcatagcaactactataggcagtgattctaagaagatgctattctttttttccattgctttgtctagttttttttttttaaatctgtttttgtgcctttgtaattctagggttattggtatagttctcaccatatcttgaatacagatgctttttcctttggaaataatttctcataaagcacattgcttatagctgcttcccttttcccagagtagtaaaagttgtgatacaagacagtgatatcagctgggcgtggtggcacacgcctgtaatcccagcacgttgggaggccaaggcaggcagatcacttgaggccaggagttcgagaccagcctggccaacatggtgaatccccgtctctactaaaaatacacacaaaaaattagctgggtgtggtggtttgtgcctgtagtcccagctactcgggaggctgaggcacgagaattgcttgaaccagggaggtggaggttgcagtaagctgagattgcaccactacactccagcctgggtgacagaacgagactctgtctcagaaaaaaaaaaaaagagacaatgatatgaaaaggtcttacatgaatgagttttacgcatgattcaatctgtaagtcctataaattatttttgatggatggtatctattttcttcctattagtagtttggggcaaaaataaatttaactgaatgtaaaaatattcagctctatggggagctgagaagaactaaatattttcagacacttgttatgtgcaggttgtttggcatatatttttaaaaatctttataataccattttgaattaaattctatccccatttaacaaatgaggaggtggtttctattcttaagtaactttcccaaaatcactcaattaagtggcaagggtgggatttaaatcgaagcctatactctttcacttgtttccaaagatgccaaactcaaaatgtggctaaacagtaaatcttgagcaaagaaatgatttactaggaagcagcacaatagaacatactggatgtaggaaatgttatatatcttgatctcattggtggtaacacaagtatatacatatgaaaaagttagttttatccttactgttagtactcagtgctcttattattcctcaaaaatgaaaaaaaaagtaaaaaa

SEQ ID NO: 1687 - DNA, 1192 bp, Homo sapiens
aaaaaatgtaagctgaaatgatgacgtgttcttttagaaggtttatcatagcaactactataggcagtgattctaagaagatgctattctttttttccattgcttggtctagtttttttttttaaaactctgttttggtgccttggtaattctagggttattggtatagttctcaccatatcttggatacagatgctttttcctttggaaataatttctcataaagcacattgcttatagctgcttcccttttcccagagtagtaaaagttgtgatacaagacagtgatatcagctgggcgtggtggcacacgcctgtaatcccagcacgttgggaggccaaggcaggcagatcacttgaggccaggagttcgagaccagcctggccaacatggtgaatccccgtctctactaaaaatacacacaaaaaattagctgggtgtggtggtttgtgcctgtagtcccagctactcgggaggctgaggcacgagaattgcttgaaccagggaggtggaggttgcagtaagctgagattgcaccactacactccagcctgggtgacagaacgagactctgtctcagaaaaaaaaaaaaagagacaatgatatgaaaaggtcttacatgaatgagttttacgcatgattcaatctgtaagtcctataaattatttttgatggatggtatctattttcttcctattagtagttttgggcaaaaataaatttaactgaatgtaaaaatattcagctctatggggagctgagaagaactaaatattttcagacacttgttatgtgcaggttgtttggcatatatttttaaaaatctttataataccattttgaattaaattctatccccatttaacaaatgaggaggtggtttctattcttaagtaactttcccaaaatcactcaattaagtggcaagggtgggatttaaatcgaagcctatactctttcacttgtttccaaagatgccaaactcaaaatgtggctaaacagtaaatcttgagcaaagaaatgatttactaggaagcagcacaatagaacatactggatgtaggaaatgttatatatcttgatctcattggtggtaacacaagtatatacatatgaaaaagttagttttatccttactgttagtactcagtgctcttattattcctcaaaaatgaaaaaaaaagtaaaaaa

SEQ ID NO: 1688 - DNA, 228 bp, Homo sapiens
tcgaggtcaggagattgagaccatcctggctaacatggtgaaaccccatctctactaaaaatacaaaaaaaattagccgggcgtggtggcgggagcctgtagtcccagctactcgggaggttgaggcaggagaatggcgtgaacctgggaggcggagcttgtagtgagccaagatcatgccactgcactccagcctgggcgacagagcgagactccgtctcaaaaaaa

SEQ ID NO: 1689 - DNA, 711 bp, Homo sapiens
aggagatgaaactagagatttgtgccaaattgtgaaaggccttgactgccttgcttcttgctaaacagtggaatttatcaacccactgagacaaagtcagttaagatttttgagccttccatatatttagctgcttatatttaatgtcttgtctttaaaaataacacgtatgacttgttgtttgcatgcttttgcatatataacttatttgaagttaggtgcttctactgattgactttgactttttgttcacaaaaatatagggatcttgatttatgactggaccacttaatgtattaatttgcactgtgttatatcctaaacttttaaaactactcatgactaatgtctttcaccaaactgttacctacgaactttctaaagaaatgtgtgacaaaggcgtgattagtttcatttgctctgccatttttagctgtatatgtgataaaacatgttttaatacatctctttttaacttcgattttatttggaatttttgaatgagctgtttgtttgtttttaagcaaagtaattggagtgaactttctttgattcccaggttttcttttttccccttttttctttttttattgcattggtagatgcagggcaagaaatttattactctaaatttgtgactcagaattttaaaactaaattaacttcataaatgcgctcacttttttcttaatgcattacgtctaaccccca

SEQ ID NO: 1690 - DNA, 374 bp, Homo sapiens
cctctctctacaagatggtataaaatttagtattattttaaagaaataatacctagcagcagtaacctggcagcccaaaggctgtatatggcccgtagatgtgtatatttatgtattttgtatcagcatttaaaactaggagattttgtattaaaatacaacatttagatttgttggaaaaatttaaaaagtctgacaaaactgtacctttatagtactcctttataggagtcagaggctggagtcaagtgttaactgtgttggacttgcttttcagtttgacagttcatggtatgccaacacctaggctgtttttcagttgccatttattatcatatgtgctctgctgcttttcttacgatagagaaacatgt

SEQ ID NO: 1691 - DNA, 710 bp, Homo sapiens
aggagatgaaactagagatttgtgccaaattgtgaaaggccttgactgccttgcttcttgctaaacagtggaatttatcaacccactgagacaaagtcagttaagatttttgagccttccatatatttagctgcttatatttaatgtcttgtctttaaaaataacacgtatgacttgttgtttgcatgcttttgcatatatacttatttgaagttaggtgcttctactgattgactttgactttttgttcacaaaaatatagggatcttgatttatgactggaccacttaatgtattaatttgcactgtgttatatcctaaacttttaaaactactcatgactaatgtctttcaccaaactgttacctacgaactttctaaagaaatgtgtgacaaaggcgtgattagtttcatttgctctgccatttttagctgtatatgtgataaaacatgttttaatacatctctttttaacttcgattttatttggaatttttgaatgagctgtttgtttgtttttaagcaaagtaattggagtgaactttctttgattcccaggttttcttttttccccttttttctttttttattgcattggtagatgcagggcaagaaatttattactctaaatttgtgactcagaattttaaaactaaattaacttcataaatgcgctcacttttttcttaatgcattacgtctaaccccca

SEQ ID NO: 1692 - DNA, 1646 bp, Homo sapiens
taaaaaaagaaaatacagtaagtagccacataaaccgcttctagctgggtccactggtccccctgcttcttgtttattaacggaatctgttcaggggctctagggctcagagctttaggggagtctgagcccttctccagccctggggtgatgggtcttgattgatccaggtcaaattctccacagatttaattctggccaatgaatatgagaagaaatgagaaggtggaaaggtgtcttagtctactttttgctgctataataaaaataccaatacatggggtaaattataatgaagagaaatttatctcatggagttctggaggctggggagtcccaaaatcaaggtgttggcatctggtgaggagcttcttgctgtccaccccatggtggagggtggaagggcagaaagagagagagggctggaggccaataggtggctgaactcatttttttatgaggaacccactcccataataacagcattaatccactcatgagagcagagcccccatgacccaaccatttcccattaggtcctacctccccacacccactgcactggggatcaagtttccaacacatggaactttgggagacacattcacgacatagcagaggaccactggagaaaggaaggtttttaaagattttttttaggacactatggaagtgatagccattggacatggatggtgtttttgtttttggcatgggaaaaggcttatacaactctggtcaacttggcaacactaatcaaaagtcaaaatctcctttgaccctagggatcccctactattaacagtattatatcttatagaacctaggtatttaggaaagaaaaaaatgttcaaagatgtattgacatttaataaaagcaaataactggacataacccagctatccaaatacaggctatcaggaaacactgtgaaggactttgaaataggtcttgcccactgcccccacccctgcctccaattactgagtgttctgtctaatctagcccacctttctgagttgattccctttcatttcactgcctttgagctactttacaattacgtaaattaagggaaactgataatgcagatgattcttgttcatagaaatgcaaattgtgaccaatggaatataactgattattgttctgcaggtatcagccaattttgccagttttgtaactacgaagcaaactcatttcagcattcctgctaggcttataattatttgttctttggattctcctttgagccaattaaagtgtcctactggttctctcaataattaacaagttaaatacaatcatctttaacatgttacttttatatttgtatgagtcataattttaacttctaaaaaaattatcctttaacaaggtagttaagtaaatttaatgttcatgtggtataatttacttagcagccctcttaaaacagttataaaaaccatatggcaacagggacaaatactcctgataaaaatggcaagtggggaaaaaagcagaaatgcaaaatttgtactacgttgtgattaaagctaaacgttgtaagtgcttagggcaagaaataggaaggagaaaaaaaattgaagttggatttgtttgttagggtggtaggatcctggattaaaaaaaaaaaacaaaa

SEQ ID NO: 1693 - DNA, 510 bp, Homo sapiens
gaggttcctcttcaaagactttcctccctgtctaattaagaataaatagtaacttctcttaggagcaaaacttattcaaagacctgtgctaacattcttaaatatctgctagccgtaataaagaaatcaatgtactttatgttcttagctcccacaatttagcctatttgccctggcaatgcttatactggtccaagcaagcattaggtcatagcctgttcctcttccttatctgaaggtgtttttacgtttctcagcattccacaagttacttcctccttcattctcctctgcctttgcctcttttaaaaagttctaagttgctagccaatcaggacaaatacagaatgtgaggtcccgttccagccaatggaaactggacacagcagtaaagtggacttgtcaagttataaatgaccctgtctcctttgttcggtgttctctcgtggcaaaactgctggcgagtgtaccctttctgcagaaagtataaaaatgaccttgctgaagaaa

SEQ ID NO: 1694 - DNA, 1972 bp, Homo sapiens
tcacccaacaatgtttttttcatgttgatcactttactaaagcgaacaattggggttttaccaaaattgtgaaggattttattcttccatacttatgtctgtgttcagggtcatacagattctactttttccttttagtttaaggtattctcttggagatttaatgtacttaaatttgaccacaatttattgagagcatattctgtgtcagacattgcactctgcactagatattcaggaatttctaaaaagaatgttaacattgctgttacatagtcagttactgatcacattcttttcctctcaacttttttcaaaataggaatctgcggtatgttttcacgtatggagttcaggtcaggcttaggggtccctgacaatgtgaatagttttaagctgggcctcaattcgtggtacccttatactaatttaacaagccgtggactctaggttccaccaaaaatattttgttccatcctctctggtttcagtccatggtgtacagaaagaaaactaaggaacttcagccccaaattgtcaaattttgctacttaagaaacagaagatttaaatctatcattttgtcttatattccagagttgactggttcctcctgtctttaacttcttgtccttgaagggtattctaattttcattcagaaatatgacttctcatagggtttgtgttagatattttcagggccagatggatatgatgttcccatttctgttttattgttaaactactattccttttgagctgtaatgaacaattcattctgagaggcaatatatgttttcagtaattgacttgaataaaagtaaatgttaaacatggagttactaagttaatacagtgggtattagtactaatttgttcaaattaagatagaattcttaatttgataaatagaattcttatattacagcatcagtccaattggattgatagtttgtagaaaggtaatttcttacatgaggaaagacaggttttctttctcttagcaaggtattaatgcaaaaatgacctcttcatttcctaccagcttccagaagggaaatgctggttaggaggtaaattcaatttactctacaagcaaacttcacatctgttatgctgaagtcagagtttatctttcttgttatgtggaacctagaaatataccatgaggaatactgaaaaataaactagcagaaattttgcgtgatgctgaggatttttagatggctgcaaaatgggtgaaagtaatataaacttaacaaagaatgttgtcacaactctctggaacttagtactgtttttcaactaacaaatggaagatttgtgagactaggtcgacttaatgtgatttcaatgcagtaattactgtgtggcatgggcatggtaagagataggccttttctagaaatattctcatctctgttttttttagttgctcttacttagatttatattaactcagcttcacattttcatttctttttattttattttaaacaatgagaaaaatactccacgatgtcactgatttagttatcagatttgctttatttctgtatataataggtaatgtgagtacaggaaatatatctgaaaaggttacttgtacctaaattttaagttagatcatttaaaaattacttataagtctcttgagtgttttatatagtagggcagatggaaaaacttatttgatattcatttttggtacctcttaggaaaataattgggaatgtattcagttggaaaaaatgttgagaagagtgttttatataatgattatttagtaaaacattaaaaataatttcttattctggaggtttatagacatcaaaattgacaaagattcatggattatacatttcatcaaggtacctttaagcgattttttaaaaaaaattctgactctaacaatgcatgctcattgtagagcgttaaaaatacaaaaacatgcaaaagaaaaaattaaaa

SEQ ID NO: 1695 - DNA, 105 bp, Homo sapiens
ttttttgtatttttagtaaagacggggtttcaccatgttagccaggctggtcttgatctcctgtcctcgtgatcctcccgccttggcctcccaaagtgctgggat

SEQ ID NO: 1696 - DNA, 949 bp, Homo sapiens
gtcatgtttaagtggggataatgacattggcatacctgcttgctagagttaatgtgtgggtcatgagataacgaatataacaaatatttggaaaagtactatgttgaaatattttaaaataaaatttaaatccctcttcatttagaaaggatttgaggcagctaaatgcagaggtgtaagatggttttttggttaggattgtttctgagctgtgactctgtagtcactttcttactcagccctgccactcagctgtattcctctgtagctctgggcagacgactctgaacacggcttcatattggccttccatgagtgggtgaagggcatagtcatctggcagttttacctgctgttctatgcatgtctctccagcgcttgcttattttccccttctgcaaacattccattcatgccatgggcattcagtacagtcctgtaagcaagggtaggggcggcacaccaggtggatttaagcgcaaagacaggacgactgctttgccacaggcgcctttacagccagcagtgaacagttagacatattcaccttcctctaggtggaaaacagtcctcttctcagtagccctctcatgttcttgagacccatttgatataaataacaatgttgcaggaaatttcctgaaggaactgaaatgaaccatagaaacgagatcattcttttcctaccacacagctgggattagactgcttagtttgtacttgcagcacttttgcagtatgggccgtattaaaaaaaaaaaacatttaacactcagctatgggtacaaagatagtcactgaaacattattatttacttttatttatatatttatttttgagatggagtctcgctctgtcgccaggctggagtgcagtggcgcaatctcggctcactgcaacctcagcctcccaggttcaagtgattctcctacctcagcctcccgagta

SEQ ID NO: 1697 - DNA, 1359 bp, Homo sapiens
aattttggtttttgttttgttttgttttttgagatggggtctcgctctgtcgcccaggctggagtgcagtggcgcaatctcggctcactgcaagctccgcctcctgggttcatgccattctcctgcctcagcctccagagtagctgggactacaggcacccaccaccacacccggctaattttttgtatttttagtagaggcggggtttcaccgtgttaaccaggatggtctcgatctcctgacctcgtgatctgcccgcctcggcctcccaaagtgttgggattacaggcgtgagccactgcgcccagccaattttggtatttttagtagagatggggtttcaccatgttgaccaggatggtctcgatctcttgacctcatggtccgcctgcctcggcgtcccaaagtgctgggattacaggcatgggccactgcacctggctgcattattattattattattttattttgagttagggtcttgctctgttgtccaggctggagcacaggggtgcagtcatagctcactgcaggctcgaacctccaaagttcaagtggtctttctgccccagcctcttgagtagctggaactacaggtgcacaccacctggctaattttttattttttgtctagaggcagggtcaccctatgttgccaaggctgatcttaactcctgggctcaagcaatcctcctgccttttcctcccaaagttctgggattacagacatgagcaactgcttctggcctgaagcattaagagcaaaaagaaagtggtaatcaccatgtactgatatggatatagtaccaagatatgttattaagtgaataatgcatgttacaaaacagtgtgcataatatgatgcattttgataaataaatttatgtatatatgcacatattgttttctctggtaggaaagaaaagcataaacagggtttctctttgatggatggagtggggtagtgaggggagaagttcttatttttccatttaatactactccttggtgtttgaattttacagctgtatacagtattaagttttttttttttttttgagacggagtctcgctctgtcacccaggctggagtgcagtggcacgatctcggctcactgcaagctctgcctcccgggttcacaccattctcctgcctcagcctcccgagtagctgggactacaggcgtccgccaccatgcccggctaattttttgtatttttagtagagacagggtttcaccgtgttagccaggatggtctcaatctcctgacctcatgatccgcccccctcggcctcccaaagtgttaggattacaggcgtgagccaccgtgcccggccagtatgaagtatttttaaa

SEQ ID NO: 1698 - DNA, 294 bp, Homo sapiens
tcttggcctcccaaagtgttaggattacaggtgtgagctaccactcctgaccccaagacaatatcttaactgtaaaaattaaactctaccatattttaaaaagctgagatagtataaatgtttataataaaacataaaaccaacatttctcacaagtctttgtaactagtagagactgtagttgttctgtccagatataagtgtggtatatcaacttggcacttagcaacattgatatttaatttgttaaatttttgttaggaagaggtgttttcagatctcaggtgtctttgg

SEQ ID NO: 1699 - DNA, 12710 bp, Homo sapiens
cttgccactttgctgtctacagctccaatcacatccttcaccaggctcaaggactgtgctagatcttcctgctccacttcattgtcttggaaggaaagaataattctgttttttatggctctttttggacaagggcagaagcaagggaatcctgacttctcactccatatcatcttttccctttgtgactatgctatcagagggaagccaacacgtcagagatcatgtgcctatccttcttgctgtcataagtttgattctaaaaaaagtcagaagttttcaatgatataaataatatgcaatcatatgttgtgctctgaaataaaaggaactaaagacttctaggagggacagtaatagcaggaagagcaaccaagtttttttttttttatttgttttacttaatttttaatgtactgccttgtaatctttaaaataactacctaggaacagaattagccaagagagagaaaccagtaattactgattaagtgaaaaacagcagcaattctagcacttctgggaataactagtggaaattatctcccagcctagtgataacagaatactgttcaggtcattgaactctggatggaatcaatgtgttccctttccttcttgctatcatctatcctaagtctggtaacataacagtccaaattttcattcaacaaaattcaagataaaacacaaggtctcttttagacatactaaagcatgaaatagcacttccatggggcttccagtactactggccacagaggaaacagtccatgaccatacaagaccgagttagaaaggagacttacctttggtacactgcaatattctttggaataaaactgggtacttggtaatccgctgagttacaagcaatatgcactctggaattccaagccttctaacaactgaactgctcatcttcttctgcaagggagtaaacagactgtgaggaatcacatgaaaaaggctctagtgaaagccgacagggacacatggctctcaacaataacggggattttcatgtttcttatcaatacctttacaaaggcttgaaaacgcttatccttggcataaaggtctttgaagtagtttacagactggttatgttgcccacaaaacttgccatatgtcttctttaaacgttctgcattctcacctgaaaactgcagagaaaagagaacagaagttatgccatggggcgccaaactcataataccattttgtaaaatgtttccagtctagttgtaaaagtcaagagcgcttcctcataaattctcccaaaagaatgaaatggtgcagcagctttggaaagcagtctggcagttactcaagaggttcaactttaaatgggtagactatatggcatatggattaaatctcaataaagctgttatacagatttgaaaaacaacaaaaaattaaagaaactttatgtactgtgcacacggaaaatgcaaaatgtattctaacttctatttgtcataaacagagtaataaaacaatgagattcactaggagtttttcatgagacaatcttaaatatctgaccttgataagttagacagacatgacaaacagccatcatacctaggtatctgtttgtactacttacttcaggccagcagtcctaataattctatgaggcccttaaatcattcccaaatgtgtgcaatctcaatgattcctctaaaggtatgttcactttgcactaaatcaatgaatttctgtatgcagttcataaaatacatgctaattattgatttccatgtactacaaacctccagaggcaacacaaattgatccttaccaaaaaactggaaagaaggatcagggtagattttcacttcaccatttaccaatggaggagctgagacagagggacggtaagttatctgctcatatgacaaagcaaatgccccaaaggttgatcctaccactggcacacagaacgagcaaacggatactatgagttaaactgtgaattctagcaccaaagatcttactaggggttgtacacaagtacaaggaggtacaaatggtaatacaagtcaaagtttgatgaagtactaagttagagaaagtaaaagttagatgaaaccagagaggaggggcagagagagagaaatggaaatgcccaaggggatgtttcaggaggaaaagtcatcacttgtaggtcttaattttgagctctatctgttgcagctatctgtgttcatttaccgcactgcatttgcatttatttcataacatgcttacttttactcctaggagttccctgaggcagaggcctaagccatatccccctttgtagttctacctggcatttaatagatgctcagtaaatacctgaaaaatgaatgagtgaatgtgctaataaattaatgaagtgaggggtatgggctcaagaacacaaaggaaagacaaaatttacaattctcagacaaatgttccaacaattaagcctctgcttctacacagcagcagatatttgcccaaaatctttggggaatttgcatctttggggaatctgcatctttggggaaatacctagtcagatgtacatgttatatacccctctgcctgtaaaggttatactggcaatgtgtttttcaagaagaatattttaaaaagaaacattaaaatctgtctatgacaatcacatctacaagtaccaaagtaattttagctgaattttttggagtatgactaaaaccataccacaccttgatgaaagtatcaacaatacatattttattaagcattttacagatagtcacttattcaactttctgtgcttcagctggtttttagacacatgagatccttctgatttgaggcagaggggaaagttgaagatttccaacacacacacacacacacacacacacacacagagtttgtttttaaatgttgagctggggtctctcactctctcgcccaggctggagtacagtggcacgagcatcaccatggctcgctgcaactttgaactcctaggctcaagtgatcctcccacctcgggctcctgagtggttgggaccacaagtgtgcactaccacacctggctcattttttcacttttttttgtagagacagctcttggtacgttgccaggctagtcttgaacacctggcttcaagcaatccatccgcctcagcctcccgaactgttgggattacaggtgtgagccagtgtgcccagccccaaatatttaaataattttcaatttttttttttttgagacagagtatcactctgtctcccaggctggagtgcagtggcatgagctcggctcactgcaacttctgcctcccaggttcaagcgattcttatatctcagtctcccatatgccaccacgcctggctaatttttgtatttttagtagagacagggttttatcatgttggccaggctggtcttgaactcctgacctcaagtgatccgccctcctcatctcccaaagtgctgggattacaggcatgagccactgtgcctggccatattaattgatttcttaaactatactgtttctgatgatggcacagactctgaggaagaaaaactaagttttactgagcatctatcatatgcattaggtactttatatataccctccctttaactttccaaaataacattaggagagaaaccctactgtctgcattttacagaaaaggaaatcaaggctccagagaaattaaataagttccctgagcttacacagataataaatggtagaaagaagatgtgaatgcatggctgtggaaccccatgacttccctttttcccagtgtatgtaagaacctgagatccttcccattctcacctgatttacaagcacatcccctatcctcttgatgagaaagttcttttcacttttatccaccagagactccttcttccgctccagaatcctctggaagaattggctatggatactgatcagctcatccaaacaggggaacagcttttctaccatctgctgctcaaaaagcagatccgccatcatcccctggctgtacacaccactcatgatcttgagagtgcggacatgatgaaactctgtctgcatcaactctaaaaggaggaaaaagatcaagtgtcaggaacactcttttataagcattcgccctcagagatcatctgctgcagtcgcaaagctagtttagagcccaatttgaaccttaaaattgggtcaacagctatctttcccctaaaagtgttctcgttttttgttttttgtttttttttaagacaggttctgctctgtcacccaggctgaagtgcaggctgaagtcatggctcattgcagcctcaacctcctgggctcaagcgatctttctgctttagcctctcgagcagctggggctgcaggtacatgccatcacgcctggctgatttttgtattttttatagaaatggggtttcactatgttcccaggctagtcttgaactctgggctcgagtgatccacccgcctcagcctcccagagtgctgggattacaggtatgagccgctgagcctggtcaagtgttttcgtcttattcctctatttttcacgtgtcctattttctgataataggtaccccggattccatcagtcttaaattatgacttccaaagaggtcttcactggattcagcacctgtcgtaactgactgtatacccagttctcagaaatgacttgtgtttagtctagtttttagtgtaggtaaggaaaaaaactgagatatctctttctaggactgctgtataaataagtactcacatataagtacaatgttcagtagaactgaaaacagaagagtggggcaaaaaggagataggataccaacaggaccacgtctctgtaccttaaagtttttaaaggaaatcttttcaagaagccacatactaaaaaactgatttttcatagtccaacaaattactgcttaaaaatgctggacaatggaaatcaaatataatcagagcaaaatgaagactctcaccatatattacttcttgccgtttgaccacatctttcttttgctgttttagaaacttgctgtctattatccgactccaagactctgcttccagctgtttggactcaatctcaaagtctcccagtagttgtccttcattcatgtctgtacctactcctcaatatatcaaaaaatcaatatcagaatcaggtttgtgacctgtaaaataagcctatgttggactttcctcaagatgatagttgatttcataagacacatgaatacaggggatattcacagagatcatattctagtaccagaaaaaaatcaatatcctgttcaggagtgacagactctacattcgagacttaggttaacagtaataaacatgacataaatcaaacatgattaagacatgacttctatctacacgaagttaagaattggaagggacctggtaccttttcatatttaagagagcaggcttacaattgctctgtgagctagaactgtacatgtaaaaaagtctaagggaaggaaaagatttgtactaaagagtaggcccacatcgaaataatggacatccttcacttgacagctgctggatgagtctgattacgcagtcatgacaaagcactggacactttactgacaatttagagaatcttcacgggatacagaagaggcaggtactgtcactccattaagacttatgttctaggtaatgacacacacacagtccctacagaggcataaaataaaggccataacttcctcttaccctcatcagtaagtgattctgttgactcattgaccttgctgattttatttagtgagtctgttgaatgagacaggaatttccaggtgtttgacatgttctcatcattgccaactctggggacaaaagaaaaatacatactgtcaaatacattctgataacctatggcttgcattcttaaatgagtacctgaagactctagaatgacaactggctggaagtactacagtgactgaagacaaattgcttatgtcggggccacagcaacatgcacatggcctggtaacaaagtcgggagcatttagtatcactggagactcaaattctgaggactttttgagcctttttaaagaaagtgataagaagcaaggggaactttcttccatcaaaccatgtacacattatataagaaactttctgtttaaaacttattgcctaaccaatacactgttttttctgttctctagataactacagatctagcacttacaatcaactatgttctctttggactttctcaatcccaactcaccagctagcacagcaggcacccaattgatgtgtgagtagacacaatagcaagaacactttaaagaccaacttttgaaagttacaatgcatacaaactttagtaatgttacaacttttgaaaagtacacttttggaaataatgagaatacaaagacaaaacaaaacaaaacaaaacaaaaatacctgaaactttttagaggaggagaaaacattagccagcacagaggttaggaattacaaacaaaaggagacttttgcatcctttagttaggaattttgctccaagataggttaaagagatactctgagtcctacatttgaaatggcttattcacccgacgggaaggcaggcatcttacccaaaatagtcagcaacatcattatcagccccctgctaaccacttgacagccaaggcctggccaggagaccagaaaagaaactcagtgcaaacgagtgagtgagaacctaatagtaataattggctcagcactcacctccatgaaactgacttaagtgttaaaaggcaaagatgtaaaacagaggtaagaagaaacaaaacaaccaggtttacttgaacaacagaaaagcatgacatctgtaagtggttgcaacccaaaattctgaattaaatcaccctttttcctattcctacttattttgatctaaaaaatcatctttttagaactcagattcttcaaaagtagggctgatgatatacaaaaagcctacagcaaccagcctgctaagggtatttaaaggagatccttgcgacagaatgaccatcatgacatgcatcagaaacataatccccatcgtccttgtctgcaccaacccatgaccttatagatttatttcttaaaaaaaaaaaaaagctttttgtcatatgatgtgattattatgctctggtcacctagatgccaactgtgctatctttaaatatctccacttacccagtaatgttctgtatggagacacttttggagagcgagacactctgctgggatcgtctattggcaaatattggggtggtagcggtttcatccaccaggaggactgcggaccgaggacgctccttgggctgtgaggctgcaaaaggaggacactaactgaagcatcacccatccagctccacctggtactgacccatctgacaaataacaagcagaagtaaggcgctttacagtggatttgccctggaactgtaagtttatataaaaactccatggaggagaggacactaactgaagcatcacccatccagctccacctggtactgacccatctgacaaataacaagcagaagtaaggcgctttacagtggatttgccctggaactgtaagtttgtataaaaactccatggaggatagtttggtgataactattgaaattgtaaatgcctatattcttcgatccagcaatttcacttttaggctatgtttattttacaagatatacctgcatattcgtgaaatgatgttatgtccaaagttattcaatgcaacaccattggtaaaagcaaaagactgaaaatgacatgagtatcacaagaagactggtgaataagttatactacaccacacagcagaatacaatgccacttacaaaaaataaggacactttccaagtactgacacagatagatctatctccaagatctattaaggggaggaaaatcaaagtgcagaacaaagtatataacaggctatctttcatgcttaaaagagagaaaaataatccaagttgtatttactttaacaagcgaactccaggaaaataaacaaaaaaaactaagaagagtggttacctctggggtgggacaggcaacggggataaagaatcctgtgggagtattacatattttaatatttaagctgcaaataagattgaaagaatttcttttttttttgaaatgcagtcttgttctgtcgcccaggctggagtgcagtggcgcgatcttggctcactgcaagctccgcctcctgggttcatgccattctcctgccgcagcctcccgagtagctgggattacaggcacccgccaccatgcctggctaatttttgtatttttaatagagacggggtttcactacgttggccagactggtctcaaactcctgacctcatgatctgcccgcctcggcctcccaaagtgctgggattacaggcgtgagccactgcacctggccccaagattgaaagaattttaagggtaaaaggaacctgagagataactgggagcagcgttctttaggaccgttcaccatgaagacatctggagtgcctgttagatatggaatctcagccccccttgtcttctaggggtggaacccaagagtctacatatcttacaggctcaagtgattcttctgcgctccctgctagcgagcatagattttgatgatttcctttaatttacagatgaggaaaatttaacacttgtttaacacctgtaactacagatgacccctgaacaacatgggtttgaactacatagatccccttatatgtggaatttcttctgcctctgccacccttgagacagcaagaccaacccttcttttcttcctcttccttcttggtctactcaatgtgaaaacgacaaggatgaagacctttatgatgatctacttccacttaacaaacagtaaatatattttctcttccttatgatttttaaaataacattttttcctttggcttaatttattgtaagaatacagtatataatacacataacaaacaaaatgcattaattgactgtttatgttattggtaaggcttctggtcaacagtaggctattagtaggtaagttctgggggagtcaaaaagttttatgtggatttttgactgcatgggggtggggctggcacacctatcatccgagttattcaagggtcaattctaaattgttctcatagtgcatatttctcattaacatgactaaagaggaaactggagatctaatttgctaaagtggtcacgctggcacttgggaacatttttccctggtaatggacttgctgtcccattcacaggttgcattatctgtccatccccaggagtgtcaagaggtgaaggaaataagactggggtggtagttatgacttcacagtatttcaggatgtctttgactcaatgagcattaatataatcattaatttccaattcaaattctatttacaagatgatgacacaataaaatagcagaaacccgacattctaaaacctgaccagattctagctgcagaaagtacacaaggattatgggatgtggccctacccctctgcccccacccccacccccacccaagagaaaaagagcaagtgggtagaaaagagaatgagcttaagagttaaagggcctggagcataacctgaatgtttctgaagggaggtcactgagcggataaaatctgatggaggaagaaaacactagttcttgaagaattgcaaggatgtggatgggtcagaagaaaaaagagaggacaattctgatgagaagaaccatggaatgaaggcagaagtaattatgtagtattaatgtaaaagggagacacagagtagaagatgaagcaggtagaaggaatcagtgaaagggctggaaaagcagaatgatgttaggcagagctcataataacttgtatctaaaagccagcataggggggaagaaaataacagctttccttatttgtaaccaatccatattctacccaagtaagtgactcaatattgctgtttccttatttgtgatgatcatagcagtgaaagctaacacttaaggaatgtttactgctaagtactttataggtatgatctgatttaaacctgactaccaccctatgatactattatcgtccccttttacagaggaagaaaatgaggcacagagaggtttggtaatgtccagttacacagctcttaagcagtggtgtcagacttgaatccatacaattagaattcacaatctgtactctacaccactatgttgcctcagtggagtacaacaggaataagaatatttgtgggagggccaggtacagtggttcacgcctataatcccagcactttgggaggccaagacagacagatgccttgaggtcaaaaattcgacaccagcctagccaacatggtgaaaccctatctctagtaaaaatacaaaaattagctgggtgtggtggctcacacctgtaatcccagctacttgggaggctgaggcaggagaactgcttgaacccagaaggcggatgttgcagtgagtggagattgtgccactgcactccagcctgggtgacagagtaagactcttgtctcaaggaaaaaaaaaaaaatacttgtggggatcaaaggtaatactcatgaaccttgcacataataggcatttgtttttaagaaagacatgaaaataagaaagaaaacagacttctgaaacaacagataatgtcacaagaaaaaaagcattttaggaagctagacataaaaagtatgtggaatgggtaagatcacagactaaaagtgggtatcaacctggagaagctcctcttctagtcatctacgtgtgaagatggataaaaaccagattaaatatatctaaagggaatcactctcttctgggagtgtagactagtatagccattcaggagctatctggaagtactcagagaaactgggcataaaggagcggttttcaagcttgagtgggcatcagaatcacctggaggatctattaaaacacagaccaggctgggtgcggtggctcatgcctgttatctcagcactttgggaggccaaggcatgaggactgcttgaggccaggagtttgagacgagcctgggcaacgtagtgagaccccgtctctacaaaaaaattaaaaaatcagccaggcatagcggcgcacacctggagtgccagcaactcaggaatctgaggtgaggggatttcttgagcccaggagtttgaggttacagtgagctatgatcacaccactgcactccagcctgggtgacaaagcaagaccctgtctctattaaacacactcccacacaccacaaaaaaacacagaatgctggtcccatcccacggtttgtgattcacagatcagggtggggcccaagaatctttacttctaaaaaactacattttcaagaacactgcctgggaaaagtctcacagaggctcccatggagccagctaagaagatattaatcattgcattatttatggtagtagctggaagcaaagtaaatattctgtctctaggggaactttaaatgtgaaatatgcttatgaaagaataccatgccatagtctgaaacaatagcgtacaataacatgcatatctcaaaacaatattgagtgaaaaaaataagcagaacatataagcataagtcatattatctaatttaaattcacacaaaataatacatttttttcaaagtatacatatgtctaaaaatatggcagattagaaggacatacattaaatatactaaagtaggaatgagacagggaatggggagtgaaaagggaaaagtatcagtaaaaccaaagtggagtcttctatgcactggtgaaaatggtttgatgtgaatggaagagtgtgatttactcaattctgaataacatttgaggtccttagaaataataaaaaaaaagaactattttctataacttctcagtttagaaagaagtttaggccgggcatggtggtgcgtgcctgtaatcccagctattggggaggctgaggcaggagaatcgcttgaaccagggaggtggaggttgcagtgagccgagattgtgctattgtactccagcctgggcgacagagagagactccgtctcaaaaaaataataaaaaaaaaaaagtttaacaagccagatctcatttgatttgtatgattgtaaggcactaaaaacaagtcttttaattctcaactactattaaagaggaagttgagatgcgcaggggtcacttgcttaaacacacagggcaaaggtgctgcctttaagctaatacacagactgttttagagaccttccaagagggtttgatggtataatgttatatgggtaaaggaatctgcaggataaaacagcagccttctctcacttaccacaaaataggtattcatatcttgactatgaataataactgaatattacaacagcatttttacattcagaaccagaaagtcagaaagggaattgagaggtgggctgagctacttacgcttgtttctcataatgaccgtgggcagtgatgatgtgtcatgtgcctgaaggctccctttgggctgctaaagagaaagaaagtaagtccattgacaattcacctctgacaagccctgagaagccgagtaggaagggagcaagcagttcagcttcctttcccactctgctttttgcactgccctaagcaccctgtgtcccagc

SEQ ID NO: 1700 - DNA, 8243 bp, Homo sapiens
cgagtgatccacccgcctcagcctcccagagtgctgggattacaggtatgagccgctgagcctggtcaagtgttttcatcttattcctctatttttcacgtgtcctattttctgataataggtaccccggattccatcagtcttaaattatgacttccaaagaggtcttcactggattcagcacctgtcgtaactgactgtatacccagttctcagaaatgacttgtgtttagtctagtttttagtgtaggtaaggaacaaaactgagatatctctttctaggactgctgtataaataagtactcacatataagtacaatgttcagtagaactgaaaacagaagagtggggcaaaaaggagataggataccaacaggaccacgtctctgtaccttaaagtttttaaaggaaatcttttcaagaagccacatactaaaaaactgatttttcatagtccaacaaattactgcttaaaaatgctggacaatggaaatcaaatataatcagagcaaaatgaagactctcaccatatattacttcttgccgtttgaccacatctttcttttgctgttttagaaacttgctgtctattatccgactccaagactctgttccagctgtttggactcaatctcaaagtctcccagtagttgtccttcattcatgtctgtacctactcctcaatatatcaaaaaatcaatatcagaatcaggtttgtgacctgtaaaataagcctatgttggactttcctcaagatgatagttgattttataagacacatgaatacaggggatattcacagagatcatattctagtaccagaaaaaaatcaatatcctgttcaggagtgacagactctacattcgagacttaggttaacagtaataaacatgacataaatcaaacatgattaagacatgacttctatctacacgaagttaagaattggaagggacctggtaccttttcatatttaagagagcaggcttacaattgctctgtgagctagaactgtacatgtaaaaaagtctaagggaaggaaaagatttgtactaaagagtaggcccacatcgaaataaatgacatccttcacttgacagctgctggatgagtctgattacgcagtcatgacaaagcactggacactttactgacaatttagagaatcttcacgggatacagaagaggcaggtactgtcactccattaagacttatgttctaggtaatgacacacacacagtccctacagaggcataaaataaaggccataacttcctcttaccctcatcagtaagtgattctgttgactcattgaccttgctgattttatttagtgagtctgttgaatgagacaggaatttccaggtgtttgacatgttctcatcattgccaactctggggacaaaagaaaaatacatactgtcaaatacattctgataacctatggcttgcattcttaaatgagtacctgaagactctagaatgacaactggctggaagtactacagtgactgaagacaaattgcttatgtcggggccacagcaacatgcacatggcctggtaacaaagtcgggagcatttagtatcactggagactcaaattctgaggactttttgagcctttttaaagaaagtgataagaagcaaggggaactttcttccatcaaaccatgtacacattatataagaaactttctgtttaaaacttattgcctaaccaatacactgttttttctgttctctagataactacagatctagcacttacaatcaactatgttctctttggactttctcaatcccaactcaccagctagcacagcaggcacccaattgatgtgtgagtagacacaatagcaagaacactttaaagaccaacttttgaaagttacaatgcatacaaactttagtaatgttacaacttttgaaaagtacacttttggaaataatgagaatacaaagacaaaacaaaacaaaacaaaacaaaaatacctgaaactttttagaggaggagaaaacattagccagcacagaggttaggaattacaaacaaaaggagacttttgcatcctttagttaggaattttgctccaagataggttaaagagatactctgagtcctacatttgaaatggcttattcacccgacgggaaggcaggcatcttacccaaaatagtcagcaacatcattatcagccccctgctaaccacttgacagccaaggcctggccaggagaccagaaaagaaactcagtgcaaacgagtgagtgagaacctaatagtaataattggctcagcactcacctccatgaaactgacttaagtgttaaaaggcaaagatgtaaaacagaggtaagaagaaacaaaacaaccaggtttacttgaacaacagaaaagcatgacatctgtaagtggttgcaacccaaaattctgaattaaatcaccctttttcctattcctacttattttgatctaaaaaatcatctttttagaactcagattcttcaaaagtagggctgatgatatacaaaaagcctacagcaaccagcctgctaagggtatttaaaggagatccttgcgacagaatgaccatcatgacatgcatcagaaacataatccccatcgtccttgtctgcaccaacccatgaccttatagatttatttcttaaaaaaaaaaaaaagctttttgtcatatgatgtgattattatgctctggtcacctagatgccaactgtgctatctttaaatatctccacttacccagtaatgttctgtatggagacacttttggagagcgagacactctgctgggatcgtctattggcaaatattggggtggtagcggtttcatccaccaggaggactgcggaccgaggacgctccttgggctgtgaggctgcaaaaggaggacactaactgaagcatcacccatccagctccacctggtactgacccatctgacaaataacaagcagaagtaaggcgctttacagtggatttgccctggaactgtaagtttatataaaaactccatggaggagaggacactaactgaagcatcacccatccagctccacctggtactgacccatctgacaaataacaagcagaagtaaggcgctttacagtggatttgccctggaactgtaagtttgtataaaaactccatggaggatagtttggtgataactattgaaattgtaaatgcctatattcttcgatccagcaatttcacttttaggctatgtttattttacaagatatacctgcatattcgtgaaatgatgttatgtccaaagttattcaatgcaacaccattggtaaaagcaaaagactgaaaatgacatgagtatcacaagaagactggtgaataagttatactacaccacacagcagaatacaatgccacttacaaaaaataaggacactttccaagtactgacacagatagatctatctccaagatctattaaggggaggaaaatcaaagtgcagaacaaagtatataacaggctatctttcatgcttaaaagaaagaaaaataatccaagttgtatttactttaacaagcgaactccaggaaaataaacaaaaaaaactaagaagagtggttacctctggggtgggataggcaacggggataaagaatcctgtgggagtattacatattttaatatttaagctgcaaataagattgaaagaatttcttttttttttgaaatgcagtcttgttctgtcgcccaggctggagtgcagtggcgcgatcttggctcactgcaagctccgcctcctgggttcatgccattctcctgccgcagcctcccgagtagctgggattacaggcacccgccaccatgcctggctaatttttgtatttttaatagagacggggtttcactacgttggccagactggtctcaaactcctgacctcatgatctgcccgcctcggcctcccaaagtgctgggattacaggtgtgagccactgcacctggccccaagattgaaagaattttaagggtaaaaggaacctgagagataactgggagcagcgttctttaggaccgttcaccatgaagacatctggagtgcctgttagatatggaatctcagccccccttgtcttctaggggtggaacccaagagtctacatatcttacaggctcaagtgattcttctgcgctccctgctagcgagcatagattttgatgatttcctttaatttacagatgaggaaaatttaacacttgtttaacacctgtaactacagatgacccttgaacaacatgggtttgaactacatagatccccttatatgtggaatttcttctgcctctgccacccttgagacagcaagaccaacccttcttttcttcctcttccttcttggtctactcaatgtgaaaacgacaaggatgaagacctttatgatgatctacttccacttaacaaacagtaaatatattttctcttccttatgatttttaaaataacattttttcctttggcttaatttattgtaagaatacagtatataatacacataacaaacaaaatgcattaattgactgtttatgttattggtaaggcttctggtcaacagtaggctattagtaggtaagttctgggggagtcaaaaagttttatgtggatttttgactgcatgggggtggggctggcacacctatcatccgagttattcaagggtcaattctaatttgttctcatagtgcatatttctcattaacatgactaaagaggaaactggagatctaatttgctaaagtggtcacgctggcacttgggaacatttttccctggtaatggacttgctgtcccattcacaggttgcattatctgtccatccccaggagtgtcaagaggtgaaggaaataagactggggtggtagttatgacttcacagtatttcaggatgtctttgactcaatgagcattaatataatcattaatttccaattcaaattctatttacaagatgatgacacaataaaatagcagaaacccgacattctaaaacctgaccagattctagctgcagaaagtacacaaggattatgggatgtggccctacccctctgcccccacccccacccccacccaagagaaaaagagcaagtgggtagaaaagagaatgagcttaagagttaaagggcctggagcataacctgaatgtttctgaagggaggtcactgagcggataaaatctgatggaggaagaaaacactagttcttgaagaattgcaaggatgtggatgggtcagaagaaaaaagagaggacaattctgatgagaagaaccatggaatgaaggcagaagtaattatgtagtattaatgtaaaagggagacacagagtagaagatgaagcaggtagaaggaatcagtgaaagggctggaaaagcagaatgatgttaggcagagctcataataacttgtatctaaaagccagcataggggggaagaaaataacagctttccttatttgtaaccaatccatattctacccaagtaagtgactcaatattgctgtttccttatttgtgatgatcatagcagtgaaagctaacacttaaggaatgtttactgctaagtactttataggtatgatctgatttaaacctgactaccaccctatgatactattatcgtccccttttacagaggaagaaaatgaggcacagagaggtttggtaatgtccagttacacagctcttaagcagtggtgtcagacttgaatccatacaattagaattcacaatctgtactctacaccactatgttgcctcagtggagtacaacaggaataagaatatttgtgggagggccaggtacagtggttcacgcctataatcccagcactttgggaggccaagacagacagatgccttgaggtcaaaaattcgacaccagcctagccaacatggtgaaaccctatctctagtaaaaatacaaaaattagctgggtgtggtggctcacacctgtaatcccagctacttgggaggctgaggcaggagaactgcttgaacccagaaggcggatgttgcagtgagtggagattgtgccactgcactccagcctgggtgacagagtaagactcttgtctcaaggaaaaaaaaaaaaatacttgtggggatcaaaggtaatactcatgaaccttgcacataataggcatttgtttttaagaaagacatgaaaataagaaagaaaacagacttctgaaacaacagataatgtcacaagaaaaaaagcattttaggaagctagacataaaaagtatgtggaatgggtaagatcacagactaaaagtgggtatcaacctggagaagctcctcttctagtcatctacgtgtgaagatggataaaaaccagattaaatatatctaaagggaatcactctcttctgggagtgtagactagtatagccattcaggagctatctggaagtactcagagaaactgggcataaaggagcggttttcaagcttgagtgggcatcagaatcacctggaggatctattaaaacacagaccaggctgggtgcggtggctcatgcctgttatctcagcactttgggaggccaaggcatgaggactgcttgaggccaggagtttgagacgagcctgggcaacgtagtgagaccccgtctctacaaaaaaattaaaaaatcagccaggcatagcggcgcacacctggagtgccagcaactcaggaatctgaggtgaggggatttcttgagcccaggagtttgaggttacagtgagctatgatcacaccactgcactccagcctgggtgacaaagcaagaccctgtctctattaaacacactcccacacaccacaaaaaaacacagaatgctggtcccatcccacggtttgtgattcacagatcagggtggggcccaagaatctttacttctaaaaaactacattttcaagaacactgcctggggaaagtctcacagaggctcccatggagccagctaagaagatattaatcattgcattatttatggtagtagctggaagcaaagtaaatattctgtctctaggggaactttaaatgtgaaatatgcttatgaaagaataccatgccatagtctgaaacaatagcgtacaataacatgcatatctcaaaacaatattgagtgaaaaaaataagcagaacatataagcataagtcatattatctaatttaaattcacacaaaataatacatttttttcaaagtatacatatgtctaaaaatatggcagattagaaggacatacattaaatatactaaagtaggaatgagacagggaatggggagtgaaaagggaaaagtatcagtaaaaccaaagtggagtcttctatgcactggtgaaaatggtttgatgtgaatggaagagtgtgatttactcaattctgaataacatttgaggtccttagaaataataaaaaaaaagaactattttctataacttctcagtttagaaagaagtttaggccgggcatggtggtgcgtgcctgtaatcccagctattggggaggctgaggcaggagaatcgcttgaaccagggaggtggaggttgcagtgagccgagattgtgctattgtactccagcctgggcgacagagagagactccgtctcaaaaaaataataaaaaaaaaaaagtttaacaagccagatctcatttgatttgtatgattgtaaggcactaaaaacaagtcttttaattctcaactactattaaagaggaagttgagatgcgcaggggtcacttgcttaaacacacagggcaaaggtgctgcctttaagctaatacacagactgttttagagaccttccaagagggtttgatggtataatgttatatgggtaaaggaatctgcaggataaaacagcagccttctctcacttaccacaaaataggtattcatatcttgactatgaataataactgaatattacaacagcatttttacattcagaaccagaaagtcagaaagggaattgagaggtgggctgagctacttacgcttgtttctcataatgaccgtgggcagtgatgatgtgtcatgtgcctgaaggctccctttgggctgctaaagagaaagaaagtaagtccattgacaattcacctctgacaagccctgagaagccgagtaggaagggagcaagcagttcagcttcctttcccactctgctttttgcactgccctaagcaccctgtgtcccagc

SEQ ID NO: 1701 - DNA, 184 bp, Homo sapiens
ttttctcaccttcagaagcatggcattcttcccctttaagacgatttaagggttgcctccttggtaaagccatctatagcttctctcctctcctcacccaaggcagtgactggcacctttctcatttatagtaactgtccgtcttccccagtagattgctggtgccttaagggcagcatctttt

SEQ ID NO: 1702 - DNA, 184 bp, Homo sapiens; identical to SEQ ID NO: 1701

SEQ ID NO: 1703 - DNA, 4400 bp, Homo sapiens
gggaccccaggcttcctttgagacatccaccagcggtgatgggttgggaccaatctcccccactcctctccaccctagcagtaaggtccccgctctcgatactgccccagcacctgcactggccctctctgatttcccaactccagcccattccaagtgctgaaggcgggtcgctaggtgctgggacctgggcgcggggcaagaccttgggctgtgtggggtgcaggctggtttactgggttcacgattgagggagtggtctgggggttaggtgtagggccaggctgcgttgtgctctaaggggcaggcggcaggcggtttgggggggctgtggtcagacagggtggggtggcggtgggtttggggaagccgcagcagcccgccttggggtcccgcgagtgccgagggagctgccggggcatggtggcgcggggcccgtggtcctgcccggcacgacccccgccccgcagcgccccgcagcgccccgcccccgcggccccgctcgcgacgcgtctcccgcggcgccccgcccccgcccgcagtgcccggatgcgggtgacgcgcggccgccatctttccgtcccgggcagccagcgccagtcggagccagcgcgagccgccgccgccatcactgccgctgccaagtcctccacccgctgcccccgccatgtgagtcggccgcccgccaccctcaccgcgcttccctgcgccggccgccgcccttggcaaccggccgtcgggagtgcccggggtctctcctgcgttccccgcgccccggggccaggcccaagccggtgactgcgcgcgggcggccgaggagccccgcgtcccgggctggccggctcgggcgatggccgcgggaaggagcggacccagtgtcctcctgcccctccccgcccctgtcaccgcggccgcctgtcttttcgggtcgacccggatcgcatctgtgaggtcgccctcagttgacaggcggggaaactgaggccgggggggcctcgctcaaggtcacgcagctcatcggcggcagggctggaccgagaccagggcttacatcgggtggccttcctcccgaaaaggaggactggagggacgaggatggacaggtggatgggcggagccctggctgcggggccgggaggctgcaggccctgggtcttaatccgtccctgctcctcaggtctgctaccgctgccacggccccccctgctgccccggctggggagggtggtccccctgcaccccctccaaacctcaccagtaacaggagactgcagcagacccaggcccaggtggatgaggtgagtgtggggggagtcaaaagcagtaggagggaccctgggggttggcgtataggtgtaggggcccatgttggtttgggagtgatgacagttcacgcctgtgggtttgcggacaaagataccatgccccatccctgtctccctgtcagcacgcacttggaagggcgctgggggtgttaatcagctttgctagcctggggtgtgccagcctgggcaggtgtgctctggtgatggacagagcgcctgaggttccatagagggagggtgttgctatgacatctgagatgtcaccagcatgcccctgatgtgtgctccttgcatgtccccaggtgtgctaggcatgttctgtgtgtccttggcatgttaacctggcagtatcagggtgcatgttccatgtgtggcacggtgggcacatgtttgaggattgccctcactgaggtgggccttggcacacccccctgcctcgtgggcccttctcccaggtggtggacatcatgagggtgaacgtggacaaggtcctggagcgagaccagaagctgtcggagctggacgaccgtgcagatgcactccaggcgggggcctcccagtttgaaacaagcgcagccaagctcaagcgcaaatactggtggaaaaacctcaaggtaagggtggggacaggaaggaggacaggtgggtgaatggggtatcatagtttgtcttactgatcctcgcctctcacccccagatgatgatcatcttgggagtgatttgcgccatcatcctcatcatcatcataggtgagtagggtgagaatggccggggccctttccctggagaggtttccccagtggattctaggttttgaaggtcattaatctagtttttactcttcagccaaaaacacatatagctgctaatggcaattctgattcatctagagccaaaaactttgatgttatttagcctgcattttgcctagttcttggcagtcttgttaacatttggaaataggaaagctggtgtatccattgaggaccctttaggcctaagagcccagtctgagaaccctggaattgaggagtgggagaaaggaaaggaccaggggcttgagacatgaccaggaagccaaccaccccattatttgagagcttgcggtctcagaggctcagaggattagggtctgtggcttcaaggccataccatggagcggaagggacctcagaacctacctgtctagccccttgctttgtagatggaaaaactgagtccaagagagggtgtcagccagctggggagtggggaggattggagcagggccaggcctgacacactgctttcttgttctctctctttctctcccctctccctcttcctcatcttcttcccctctctccacagtttacttcagcacttaaatccccgaggagtctgccctgcctagagaagggcctctcccccaaccctcagccgttcctccacctctcagccatatctttcagcccccactcccctggatccgtgtgtgtgtgtgtccgtgtgtgtgtccccctgtaaatagccagctgttatttatacatatataatattatatatatttggtctgtttgtagttttattactagatgatttttccggttgtccttaacaccccttcctgaggttcccttcacccctctctcttgccttccttccctttccctttcttcctgactagccccaagtcccttcatttgcatctgctatgcaatagtccctctcctttccttcttcttccctcagatttagctgatccttcctcccaccctggccttcctttcctctttcctcctcactctccccgtcatgctccctctgccccgccctcaaaaaaaaaaaaaaaaaaaaaaaaacaacagcacctgtccaggcttccttaggtacatcttctttgtatccattgggaggctctgagactggccccacttggtcctaagaatcccaaggtctttgggagcgtccagcatgttaattagcgtatcattacatactgctatccctttccatttctttttgttccatcactcttctctcaacctgtgtttctttttttactgaggagttagtccccattagttcttgtatcacattttcatttgcacgacattactcgcaggtggtggggagcctgggcttttggggaaccaggctgctctggtccccagcattgcctcctcctagcccctctagtccagtttgcctcccttaccctcattttccaaacctcttgtaccctcctctccctcccccagctggtatgtaagtgtcttgaagttcagtatgttatgatggaccaataattctgccacttcgggtttctccctacattcctgctccccagttttcatgtggggtactcaactgacattcccatggggtttccctcccatctgcctgatccacctcctcctcccaccaggagagttgggggttggccacaattgatctcttgtgagaggggtggctaccagtgtgtgtgtgggggtcatcactgccttggggaggagtggggcagggcagagaatccccccaattcctgcctgaaatctctggcctcacccctgctgggggttggactgaaaaccctcctccccaatttggggggtgttgccccatcactgcccagctcctctgactgccccccctgaatttagggtgggggtactagtcactgccaatgtgtgtatgggacttgctggaaaacggggatgcttgcccctctccaggactattgagcccagagagagctgtcctctcattgggtgaactgattgaggaagggtctattgtctttttaaatggcacaattttaagggtttgagggtacagtcccttaacctgccacgggagggggcccccaaactttcttccccccacacttctggttttctgtgtggagggggagcagggatatctaagctgtggtgtgaaagggtaggagagatgctggaggtgggggtgctgtgttttagaccccccatattatcccagtgtcccctgcccccctcttcccccaccccatgcccccaattctgtggcgcatccagattgtgaaaatgtacaataaatgtgtaatgagtaaccagg

SEQ ID NO: 1704 - DNA, 463 bp, Homo sapiens
gtctaagatcttttttatttttctattttttttttttggttgggggagaataagatcttttcttaaccaatgggaataatattggatcggaaggtataccaggaaggttgagaagatacattggtaatggactggactttgcaagaggccctgaccttgggcagggcaaagtgtgattctcaaagtggccacaggggggcactaggagttggtaatgggaagtgtcatagccagcccgtgtctctaagcccggtgcgccctgtggtctagggttcccagctttcgtttccctttactggggcatgttcctgctgttggactcctttctactcctcgatttaacttctagacgctctgccgtggctcccgtgcagcagtagatgaagtagttggccatttctgtgaagcatgtcttcccctctgtgcctaacccagtgccagcgcccagatggggttagtaaat

SEQ ID NO: 1705 - DNA, 359 bp, Homo sapiens
ccgggactgtcagtgcacaaggaccagggacgcggctgctcctctgagggggaggaagccaagagtatcttctcttagattgggctgagttcccacacccagcacacacattccctgctcactcacctcccacagacagctgggaaatgacacctctggtgacagagccactctccgggcttctgtggggagcgggtggggcactgcagtgggggaggatctcacacccggaggccctgggaagccagggtgggggagggaggaagctggttcctgtttgtcttagagatcaaggccatcagcctccctgcaccttccagggatgtagtaagcacccccaccccagggccaaagggcct

SEQ ID NO: 1706 - DNA, 11597 bp, Homo sapiens
cggtcacgtaactagtgagttgtgcagctagggttagaataaacagatttattttttttttttcttagaaacagcaattaacaatgtgactcctaatcaaaagaaaagagatgtccttggggcttaaagtactatggtgggagtcttggactgagtaggtttgaaaatacaattttatgatcgtggagtactaggatttagtcattttgatgcagagcatttcctgatcaactgctgttgtggagtgtactgtccaatagaattctctacaattaaggaaatgttctgtatctcaagagattgttcttaatggtggccagtagtcatgtgaccgttgagcatttgaaatgtggctagtgctactgaagaatggaattgtaaattgcttttaatctaaattttgcctgtgatattattggctgtgggtttgccaaaatttgtttttttaaagaggaaaagataacggactgttggctgctttattggacagcacagctagcatatagatgcagataggtagtataacttgtttgtagtttaatataaatgttgtattttgtaattaggccaaatttgagtttcatcatggtgactatgaaaaacagtttctgcatgtactgagccgcaaggacaagactggaatcgttgtcaacaatcctaaccagtcagtgtttctcttcattgacagacagcacttgcaggtaagcagcttttttgaaaaccacttacaggctcattcaaaaacttattggttagtaaacgttttatatacaagttacttaattgttgtgtcccccaaacactgcattatttttgaagttatttaaaaagcaaaaaataggctgggcatggtggctcatgcctgtaatcccagcactttggaaagccgaggcgggcatattgcttgagctcaggaattccagaccagcctgggcaacatgacgaaaccccatctctacagaaaatataaaaactagccaggcatggtggcgtgtgcctgtagtcccagctactggggaggctgaagggggaggattgcttgagcttaggaggctacagtgagatcttgtcactgcactccagcttgaatgacagaacgagaccctgtctcaaaaaataaaatgaatttttaaaaaagtatttcccaggcctcactgtagaacaatggttcccaaattttgctgcatgttacagcaacctggcaagccttttttttttttttaaacgggaaaaaacccacctccttcgaagcttttaaaagtcatgattctagtgaacagtagtgagaactattgccctaaagcgtgtctaccagatgtgtgggcaatggatgaacatcacttgagaacttgttaaaaatatagactctcaggctctactaatcagagtctgcactttaaacagaaccctcaggtgatttgaaacacactttgtttccagaagcactgacctggacgtttttttttttcttgagagggagtctctgtcgcccaggctggagtgccgtggcgcaatctcagttcgctgcaagctccaccttccgggttcacgccattctcctgcctcagcctcccgagtagctgggactacaggtgcccgccaccacgcccagctaatttttttttttttttgtattttagtagagacagggtttcaccatgttagccaggatggtctcaatctcctgacctcatgatctgcctgccttggcctaccaaagtgctgggattacaggcgtgagccaccgcaaccggctgactttttaaatctaaaaggatgagggacatatatttaaaagatccacatttatttcaaataagcacttccatttgggcacagtgtctcacacttgtaatcctagcattttgggaagccgatgggggaggattgcttgagtccaagaccagcctgggcaacagagtgagacgacatctctacaaaaaatcaaagaaattagccggacattgtggcgtgttcctgtggtcctagctactctggaggctgaggcaggggagaatcacttgagcccaggagtttagagttgcagtgagccatggcaccaacacactcctgcctgagtaatgcagcgagaccccatctcaaaaaaaaaaaaaacaccgccaacaacaaataaccacttcccagttaagcagcaatccaagtattgcaatttagtttttagatgcagccacttgctggctgtatgatcttggacaggtaactgctgtgagcatgttgcttctgtgaaattgaacaaatgataatcctaaggttgttaaatttaacgtaaggttgttacatttaaaattaactaatacaagtaaagtatattacatatgtataggtttatttacatttgtaggctacttcagacatcttcaaagtcagagtccttattttgccttttagaggtgctagatagtgaagaaaagatgaactttgtaattaagttggatgttcaaatggtaactactttttaaaaataagggttttgatttaactggtaatactttggcttttttctagtcccttaccccaggatatgcttaaatcttttatttattttttgagacaaggtctcaactctgtcaccacgctggagtacactggcatatggatcatggctcaccgcagccttgacctcctgggcgcaggttatccacctcagcttcccgagtggctggactacaggcgtgtgccaccacatccagctaatttttatattttttgtagagatgggttttcgtcatgttgcccagaatggtcttgaactcttgggctcaagcaatcctcctgactcagcctcccaaagtgctgggattacaggtctgagccaccacacccagccttaaatttttacctattccttcatcctctcactagcttctattcttaccacatctgctttatcttcctctatataaaaatgacttcaaacttctcaaaatctgtccccatgaaatgcctttagctttaatttcttctagcaagtagtctctggtttacttccctaactttttatcttctaattctgcataaatttttcctttatcttatatggcaagattttgtctgtctagaatatggatagggactacaatttgtcccttactctgtatgttaagatgtttaataaattgtgggaaatggacttcatgtgacagttacgctaaagtcttatttttaaaaaatattaaaatgttttccccttccagactccaaaaaacaaagctacaatcttcaagttatgcagcatctgcctctacctgccacaggaacagctcacccactgggcagttggcaccatagaggatcacctccgtccttatatgccagagtagagtactgaccagcaaaatggagaagatcagagaatgcagcagcagttttttttcttgttttcttaccactttattctttcagagtttaaagaaaatggactcatgcacagaacactatgcattttgaaacttgttcatcctggatttttttaaatcatttttatctcagaacttaaacaaaaattagatgtcgtgcacggactgtgtgaaagaagatgctttgcatatttgctgcactgcatcagtatcttactaaaaatgtgaaatgaaaggactattgtacactgaaatgcttaaatgtatctgaaagcacaaggtgatactcatttttatggtcttcccatttgtgctggtttttgcctctttgacatctgtcatcagtatttagagggtgagaagtgaatgtaacaggtataaataacatttttaaaaacaataactttgctataatcacagttgttccagagcactgtcagatacattctaatgaccagaactggtttaaaaaaagaaaatacaaccatgggaaagaaatcttaaatgaaaaacgcatctcattgtaggcatttttgcctcatattttactgggccatgtttgtttcctggtactcatgtattttttttttccagatctctttccccaagttgctattgtaagagtattctgctgcgtgtggatgcagttatacacattaaagcagatctggagtctgaagtagctataaagcagctataaaacagaaatacatgcatagctgcagaaaccatgataggtagaggacttttcttttggttttgttttgttttgttttgttttgtttttggttttacagagaagagatttttattacaaagaaaaaaattccagtgaattgtgcagaaatgctggtttttacaccatcctaaagaaaaactttacaagggtgttttggagtagaaaaaaggttataaagttggaatcttaaattgtaaaattaaccattgagtgtcaaagttctaaaagcagaactcattttgtgcaatgaacataaggaaagactactgtataggtttttttttttttctccttttaaatgaagaaaagctttgcttaagggttgcatacttttattggagtaaatctgaatgatcctactcctttggagtaaaactagtgcttaccagtttccaattgtatttagcttctggttggaatttgaaaaaaaaagaaaaaaagaaaaagaaaacctaaataaaataggtgaaagttccctgactattcaggtgaatacacaaagtttgaagtgttaactttttctttccatttcactgatgttactggtcaccttagagaattatttcatagtctgtggctaaatagtaaattcagaagaaaaatacctggcaattgagtgtgtaacttcaacaagaacaggaatcaagaacatactgtcagctttcaacagttagcaacctggccttatgccttgcttcatgggaaagggccattcttaaatttcaaaatgctttcatgtgtcctcttatttaaaaattagaatctatttgaaataacattttgaatgtttattataaccaggtactcttctaagctcttgtcttaacctctcaacctttggtggaaatagatgcagaggttaagtaacttgctcaagctcagatcataagtagtggaggatttaaaaccaggctggctggctcttaaggcctatgctcttaatttaccatgttgaattaatttaccatattgaattacacttatgttcaccaagttaggcattttggcagccattgtttacgtttttattttggaataatttagaaaagttaccagagtaatatgaaagctgttgtgtaatctttaccctcatttttattattttgccacatttttttcattttctctgtacacttatacctgtgagctatttgagtttgttgcacactttgtgcttccttaccccttccttagtacttcggcatatgttccaagtacaagaatatttcatataactagagtaaaattaccaaactcagggaatgttgatactctttatcatccatattcgttttgttgtcccagtatccttggtagcttgttttagatccccccctctagagtacaggatcattgaatttagttgttctcagttgtctttaatgtggaacagttccttagcctttatgtgttccatgacctctatgttttttggagtacagggcaatttttcttgtaaattgttactcattttgcatttgaattgtttattcatgcttaacgcccttctcaagtatactctccatctgctcttcattgatgttacttttgagcgcctggtcaaggtgtcctggttttgccctatgtgtggtacttactactagcaatctctgggaagcaatgtgcaaataccctgttcctttatcaggagctcccttggcgattctttccagactaaaacccaaaccagtctttaactatgatggttacaaaatagtgattttccaaatctaatgctttgtccatttacagcatttgttgtaagagagtgttctatctctgccatttattatctacctaaacactatggcctcatattttttccctccaaatcataatttgcatgcctttattattttgagcatctcctttcatgcataagatactgtaacctttctgtcccagcctcaagccctggagtcagctgtttctccaaggagcccagcttccttttagtgggaaatactagaagtaaacatctgggactcctgtatgctcactgctgctattgctactgtggagtcttctgccctttcacagtggacagatcagcaggcgatctaatgtagggaaaggatttgtctttaactgttaacttgacttaaatttacttaaagctgcatcctttttagtctttagtcatgaaatgttcattaagattccctgacagaaatcaagtaagagtcagctgggtgcagtggttcacacctgtaagtccagtacttggggggccaaggcaggaggattgcttgagcctaggagtttgagacgaggctgggcaacagtgagaccttgtttctacaaaaataaaattaggcgtggtggcacacgcctgtagttccagctactcaggagactgaggtggaagaatgtcttgagcctgggattttgaggctatgggaagctgtgattgtatcactccagcctgagtgacagaagctgtctcagagtgccacagtcaactgaacttggagacttctgagaagtgaacttggtcttttcaatactatagacttggaggtttgagatctgcatggttttattctcggtacaagaaaaggggctagtagcatgctttttttcttccccctctattggaccatttcctgtaacactaacatgcttagcctcaaacttttcttgaggtcttttttaggcatatggctcaatctattttatttttcaatatgggctgtagttcatatattttgaagtttcataatcttaaaaaaaggaaatgcaagtgtagcttggcattttagatctgggaaggacctaagattcgctaaggattggccattgctgtggtctccatgtgtttcccctaaatttgtatgttaaaatcccaacccccaaggtgatattagcaggtgggggtctttgggaagttattagatcacgagggcagaaccctcaagattggagtaagtgcccttacaaaagagaacccaggctgggcacattggctcacacctgtaatcccagcactttggggggccaaggcaggcggatcacctgaggtcacgagttcgagaccagcctggccaacatggtgaaccctgtttctacaaaaaactacaaaaattagctaggtgtgatggcacatgcctatagtcccagctacttgggaggctgaggcaggagaatcacttgaacccagggggcagagattgcagtgagccgagatcgtgctgctgtactccagcctgggcaacagagcgagactccatttcaaaaacgagaacccagagggctcacttgccccttccaccacacagtgagaaggcaccatctatgagccaggaagcgggccctcacctaacaggatctgctgggccttgacccaggactttccagcttctagaaccatgaaaaatttctgttgttcctagcagcccaaacagaattagaaccattaatttctatttctcctttagcttaacactggactttagttttaatcttaactgagagtggtcctgctagtttctttgctttacctgtttttaaaacactttgagctaagaatttttcacccaattatcacacatgattagaaaacaagatgcttaaagtgaaaaaagacacccccacctttaccctacttgatatccaggtccttttcctccaagaatatttctagctgcttctggttttgctagtttatttcaaaaattacaattgtttgagtcaaatctatacttgatattcattgttgggtttctttaggtcattctgctgttctctcagtttcccaggtgttttgtgtgtcttccttgtgctattaattttcctgtggccttgttggtcagatccacagaggtaaatgcaagtgtttttccttgcttcagaacatgtgctgtaatcactatatcttctcctaattttgcaggtgacatgtaccttgaaagaaaatgaatatagttaacagcagataatttttcaaagggaaagttgtgtgcatctcacaacagtgttcctatgtaacttattttactcctaaaaatagttttaacggtagtattggtaagctttctgtactatcaaatgtgaatggctggtcctaaccaggttctattttacccattccttacccacacaagtttcttttcccaaatatgtgagaagaggttttcttgcctccccttttttccctttacatttcccacttcacatttatttggggctggtgaaagatttcctccagctttcatttaatctccttaacttcttagatgaaatatcacttggtgtctgtatattgtcctatccatatttacaatttatttgactctaaaatgacaatataacaactataaggaattgatatgatgtccttacaatcttgatgatggactgtctatatttttaagagatgtacatcctagtcacttgtaatcataagttgtctttaactcagctggctccagctaattaaaaaaaaaattggggagatgaggattgtttaaaacaaatgttaatgttttaaagggaaataatttccttacagtttatttttatgtttctgctttttagaaagaaacctttaaaaaggatatgtatttttgccatattcaaaataagacttcagtatttatggctaggaggtataagaaaggtggatctggccgggcacgatggctcaagcctgtaatcccagcactttgggaggccgaggtgggcagatcacctgagggcaggagttcgagaccagcccggccaacgtggtgaaaccccgtctcaactaaaaatacagaagttagctaggcatggtggtgggcacctgtaatctcagctacttttgaggctgaggcagaagaatggcaggaacccaggaggcagaggttgcagtgagccgagatcgcgccactggactccagcctgggcaacagagcaagattccatctcacaaaaaaaaaaaaaaaaaaaaaaaaaaggtggatcttattgctggaaagaacaggcttgtctttaattcacatacctcaatgtaaagaaatgaaaaatagtatgtttagtagtagtttggccagtttttattatttccctaaattttgtcttagaaatcaagaattttggctaacagccattaacttaaactgagggaagataaggaaccctttgtgctacagatgagtaaacattaagtccggggaatttggagattgacattttgtcagtaatactctaaaatttccccttttgttgttttggaacctcgcttgtttttaacctaagtcacagtctaacaggcatcctcagtctgtataatataggacttgatgtgcaggggtggagtaaatttggtaccatgtcaagtaaatcaaagagtgaatcatgaagtgttaactgactgaaacattattcatttacttttgaaatatctctaacttttgaaagaccatgtcctagtttttgttgaagtgaatcagtttttgaagcgtaggcagctcttgatggccaatgcttttggcaacacatatttgaaaggccaaaactatgtttgacttactgaaaattccttagggttctaaaggcaaaagtaccttagtagatcatgaaatgcagtgctaggtttgaagatctctctgctcttaatagagacttttagggaaaatcaagtcatctactgatctcacctcttaccacatgaaataaggactgctgaatatgcacaccagtaacataagcagagcctttcttttctgtacatcttaatttcaaaaagagcatttggctgcatcttgtaatttgcttattgtaccctcaatttaagttattcccatgaagagggactgaatgtttcttaagtaaacttgataaaatatttagattccttaaaagcctacattggctgggcgcggtggctcacgcctgtaatcccagcactttgggaggccaaggcgggcagatcacaaggtgaggagatcgagaccagcctggctaacacggtgaaaccccatctctactaaaaatacaaacaaattagtcgggcatggtggcaggcgcctgtagtcccagctactcgggaggctgaggcaggagaatggtgtgaacccgggaggcggagcttgcagtgagccgagactgcaccactgcactccagcctgggccacaaagcgagactccgtctcaaaaaaaaaaaaaaaaaaagcctacattatttccattaccctcatatctactcacaatggctctctcaacctgacctctcagttagttacatttttgttgcttaggtggaaaaagcagttgtcttgaaactaaatccctgtgcccagctctttctttattgaatggggctgcagtagtaccagtttatgttggaattgagtttcttacattttggaagtttgaccctgaggggcactgttccctgatcatgtagtttaactcacagaacatgtctgtgtagtcacagggagagatccaggattgctgcccattcttaaaactcaacactttgggaggctgaggtgggtggacactggaggtcaggagttcaagaccagcctggccaacatggtgaaaccccgtctttactaaaaacacaaaaattagcccagcatggtggcgcacacctgtaatcccagctactagggaggctgaggcaggagaattacttgagccccagaggcggaggctgaagtgagccagattgtgccgctgcactccagcctgggtgatggggagactccgtgtccaaaaaaaaaaaaaaaccccagcaatggtgttcagtttgttagagtaagattataatgtgtatatgaactctaactttactttgaattgtatgtactcaatacaatcctcatagtgttataagtggtatttttaaaattaaataatatttattttttgtagagatgggggtcttgaactccaggcttcaagcaatcctcttgcctcggcctcccaaagtgctgggattataggcgtgagccactgcgtctggccctgaatggcacttttaaggactgtatgaaacagttatgagccatcagtttgtgatttttccccctgcatcagtatacacattaaaagctgaatgttgctcttttgaatgtttgggatcattccctttttactattgatacacactgtacttgcaaattaactgctctagttctagattttaaggctggaatattttaggacaaaatctataggtgcagttaaggagataagcagctaattgaatctcatgcgttactaataatataaatgtgtttagtctcagttgtttagacagttatcacacagaagggatttggaatacagtttggatacatacgttatgttcatatcgacactgactccgggtgctcccctttccgtgcatagcagagccattgttgatatgttatctactaacgtggctgtcaaaccgccgtggagagtgcctattgcattggtatgctcttcttctactttcatttcacaaatcactttcccaggagcagcagagacaagagtaatct

SEQ ID NO: 1707 - DNA, 22073 bp, Homo sapiens
accctctcccgcccgctccacccgggcgggaattgtttcctcgatcaaatgagtgaaaacctgagtgatcctgtgtctcccgtggtgcgagtgagtcgctgccgctgaaggctaaggggtgggggtgggacttgcgggggtggaaggctaggtggtctccgggctccgcctgggatttgggagaagaacccgcctcctttgcctcggcaatgctcacaagaagataaatcgcactccccaccattttgaacgggggcagatccacagggaagtctcccttggggaatgtaggactagttgcaggctgggggtgttgggaacccgggcattaatcaggtctaaccacagagccggaataattaataccgtattatataccccttttccttctgccgtcatgattctccttggcagcagcgttagcagccgcctgagggtgaaaatgtgggtgatggggaagttggtaatgactccgctgttttttctcatggctcctttgggccacagctgcccgcccccggtatacactgtagttgattgcagggaaaccctgtacctctccctttccttctctaccgattttgcacttttctctatgctcaccaccaagtgtaatcaataacaagcactgacaatacatagcaatagtgaaatctgaaataactaagaattaggtactacagccatggagctggctgggtaaaatctaattggatatttcagtttcattcacctaccctgttttggtgtttggttttggttttggttttggtgagttttttttttttttttttttggaaagcaaggatcacacttccccctccctgttccttaatcccttttctaaaaaggggggaaaatccggatggattttagggattggtctggtgtcagctgtgttttattgcacacctaaatcctgattataggcttttcatttctccgcaaagcctttattttggcagttaagccaaatgtgttttccagaaagttagttattttctcctctttctttcctttctttcctccctttttcccgtctgaccccaaacgttattgtccaaacatgactggacagcagcttttgtttcttgaccctgtaatatgacagtctgctaatattgacagaaggtgcagtttttgggttatagtcgtgattttcgctaatcaatcatattagcaggaaaaaaaatgacttgtttctgttgtacttgagtcttaagaaaaagtgcccatagtttagtgacaatttccaaaggctttagtaccacctgtatttcaaaatgggggacccaaactcccggaagaaacaagctctgaacagactacgtgctcagcttagaaagaaaaaagaatctctagctgaccagtttgacttcaagatgtatattgcctttgtattcaaggagaaggtaatttaaagttcttaatggtgaattagcacaagtaatttttgtaagtgtatattatttgttactcttaaattattatgaatattaggttaaagagtggttgaaaaaaagtctgctttgtatgctctgttttttcacccttaggggtgattctgtgaattgagcagttgcagcatgcgaaaagacccttgagcgttctttggtttggaaataaatttgagtctgaagcttagtagtagtatacactgagttgacatggggtgggcaagattacaaaattttatatggagttaacatgggaaaccttatgatggaatttaaagattatctaatgtagagtataaataagatggttgaaagtgtgaaattgtaatcagactgtttatatgctaaagtttatcctgtttcttaaactgcgtaatgtaggtaaccttttctcttacatttaatgaagtagaatacaccttttaggagcaattaaatactgaaatggttaatttgtgtttagaagtgtgattttcttttttacttagagttcattttgccttgtatagaagtacagtttttaaaaactcaaaatgacctagaggaagtttcatttttaggggcggtggaggtcttaatcagaattagttccgcagttaaatagcaaacagtaagttgtgagtagtcaaggatgggatgataagagcagtattttttgcaacttaaaatgaacattttcttaaattatcagcaaggcttatttgaccaaagatgaggttatgaatgtaaggaagtgctacttggattttggtgcttaaattgttagctaatttcagatcagaaatacaatcttagtgtggtatctattaagtatctggaagttttccaggtttccccctactgtttaactcttattatttttgttgctgagacaggcctcactgtattgcccaggctagtcttgaactcctgggctaaagtgatcctcctgtcatggcattttaaagtgctgggattacaggcaggagctgccacgcacagccccaactcttaactcctaaaaggttatttgtatttaagaacattcttagctgctgaagtatagcattgtgaagtgatttttaagtaatttttgaagtgactgtcccaagattgggtggtatcaaggacttacatctccacttttgttttgttgacaagctgactcaaaattgatgagattggattttagttgaagatgatacagtgtatgctctttaaataaatccaagataataagtagtgagaccatatctttgtatttaatctatatattgccccaaattgcaccatcttaattctttaacaccaacgataatctggttttattctgtgaatggacagtgtccatgcagttgccctgaataattcatgatatatacttaatagtacagaattttaaaaagtagtttagtgatgcgtacttggtcttgagtagtattaaaagagaacttggtgtgcttctttttagtctttcaaatattgatggttttggctgggtgcagtggctcacggctgtaatcccagcactttgggaggctgaggcaggcggatcacttgaggtcaggagttcaaggccagcctggccaaatggtgaaaccctgtctctactgaaaatacaaaaattagccaggtgtggtggcgcaggcctgtaatcccagctactcgagaggctgaggcaggagatcccctcgaacccaggaggcagaggttgcaagtgagccaagatggtgccactgccctctagcctgggcaacacagtgagactccatctcaaaaaaaaaaaagaaaaaccagaaatattgatggttttgataatgtaatattgagaaagtaatggaaattggcccatataaggaataaaactattcatttgtctgaatagcgttgttttaaaactggtgagatttttaattttaagaagtattgtccaaaatagtgctatggataccattatgctataaaactcaagcattaaacattctaatgacagtttgtacatgtatggttggagggggaggtaggggaagaacagaaggaattacctatctgaaaatgtgttttcagtgtataagttactgcagacagttaagaattttgtggagttaatgttacatgacattgtaatatgaactgagtgttaaaaggctgtgctccctgtgggttaatacaccattttcttttcttctagaagaaaaagtcagcactttttgaagtgtctgaggttataccagtcatgacaaataattatgaagaaaatatcctgaaaggtgtgcgagattccagctattccttggaaagttccctagagcttttacagaaggatgtggtacagctccatgctcctcgatatcagtctatgagaagggtaagttctgccttaagtcttgacttgataaagtttctgtggattaaccttgcatttccccgccccccgaaccccccttaaagtggatagttatgatagtgaccagtctcttcaggtaaatttgtctttgtgccatgttgataactgggatcatgactttaaagcattgtgtttataggattagaaaaacacgtttttttacgccagaccattcttatgtggatgaagtatataaagggatttctttaatctgtgttaggtgttgatgatctcggacttttttttttttttttttttttgagacaaagtcttgctctttcgctgaggctagagtgcagtggcatgatcttggctcactgcaacctctgccctcgcgcattcaaatgattctcctgccttagcctcccgagtagctgggactacagttgtgcgccaccatgcctggctaattttttgtgtttttagtagagatggggttttgccatgttggctaggctggtctggaactcctgacctcaagtgatcctcctgccttggcctcccaaagtgctgagattacaggtgtgagccactgcaccctgccagtagccaactgtttttaataatttaagtgttatgcagaaagtttaaaaatttttgaagtaggtttgtttttgaaaacttgaccttgagtaaaacatggacaactttgttgtattaggctcataatattgtgtattattattgtggataaatgtcttatgtctccgtttattgtatttccttttttggggggaatatgaatataaggaagtgcttccagctttgtaaacttctgcaacatgttaaaagttaatctgggcatacctgaaccaagagatccccacagttacttggggagaatgctggagataaccagatactggtctggaagaaattatggaccttcaaaaattaatatgctggctacaataatgaagcagaagtcaggaatggagaaaagtagttttctatcaaaataaaaatagcatttcagctataataggatagtgattcatattaggagttctaagacatctttttaaatagattgatttttaaaggtggaaataaaggttcagggtctgacaatacaacagatatcagagattttgttggagttttcaccatgcactgataagtctaggtcttggtgttaggagcattggactgagtgtatgtgactctctgtaagataaaaattaaaattagagccaggcacagtgacttagcctgtaatcccagcacttcgggaggctgaggtgggtggatcacctgaggtcaggagttcgagaccagcctggctgacgtggtgaaaccccgtctctattaaaaatacaaaaaatattagcggggcatggtggcacacacttgtaatcccagccattcgggaggctaagtcacgagaatcgcttgaacctggtagacggaatttgcagtaagcgaagattgcaccattgcactccagtgtgggccacaaaagttaggactctgtctccaaaaataaaaaattacatcatgagctattcagattataaactattatgtttacttcctaagatataaaatgatatatggtagatcttttgtacttataaaatgtttttataggggaaccctataatttgtgacatggcttgatgtagctgtttctttaaaagtaaacttttttttttttaatcattttataggatgtaattggctgtactcaggagatggatttcattctttggcctcggaatgatattgaaaaaatcgtctgtctcctgttttctaggtggaaagaatctgatgagccttttaggcctgttcaggtattttggtctaaagtgtgatgagtatttcaatatgtgaaaactactagaatataatagggtctaacttgagaaattctttgggaaaatggtttctgatagttttatttcacgagtctcccctatttagaatattgtgatgcaagagaagaaagcgtttggattatagaatctcttgacagtgtggtggttccacctgcccagtgtggctttgaaattatgactagagaaaatcttttaaagtggacatttactgatttatagaggggcccacagatgagcttctgagatctgtaactcttgaagccttcaccacacatccttctaaaaccgtatatttaactgctgcttcccaaaggaatgtgatctgaaatgggtgaagaaatcattttgtagaagttgatctgtatataaaattatagaagaaagaagtaaatttagtagtcattcttaaccttaaaatcttgctgacttttgactgtttgtcatggtatactagacattgctcaagtgaatcccccctctagtgttaagggcatttactcatgttgaacctagttttatttacagtatatttgtatgcatagaagatggaggtccaccaaagtgttaattatgcttagttgtaggtcaggtatagctaactttccttttttaatatatatatttacatttgtgtttcctttataatttatggcatagattgccacgattttcttaagtatacttttataatcagaaaaatgatattaaggactcattttaagtacactaaatcaaatattagaaggcttctttattttaagctaattgtgaggattatttgtcatttaaaacttttgcttctacttattaccctgaagtatctttgtggtgcttatgtttttcacagactgtataaattgatatactctcccgccccatggtaatgttgctacacataagctctaataattatcatttttaatgttttaagattaattcaactaagttttaaaaataatccattggttacatacataagaaagtactgtatacagattcccctgacttataatggttcgacttaagattttttcaactttaccatgatgtgaaagccatatgaattcattgtgctcctcgatttatgatgggactacatccaggtgaagtcattgtaaattggaattgttgtaagttcaaaagtcactttttgatttaaaatacgtgtaacttacactgggtttatcaggatgtaacatcacaagtcgtggagcatctgtatttcggtcatttaatggatgatatctgactgaagggagaaaatgaatataaaaggcatgaaaacaggaatagaaaaggcatgtttaaagttctcagcgcagggctgataactctagctgctctctggaggtggtgttaggattttgttgttttttagttaaggatttcccactggaaaaatgtaggtctgcttattacagtatgttttcaaatttctaataccctgcctttcccactgggaccttatttgaaatagttgagttaactttagtcttgtgtcaaatagtactctttgaagtcatggctgatgtttattgagagttgactgtactagtttcagcttttttttttttttttttttgagacagagtctcactctgttgccagattggagtgcagtagtgtgatcttggctcactgcaacctcctcctccttgcaacctctgcctccgcctccctggttcaaatgattctcctgccttagcctcccgagtagctgggtctacagggacatgccaccacgcccagctaatttttgtatttttagtagagacgggttttcaccatgttggccgggatggtctcgatctcttgacctcgtgattcacccgcctcggcctcccaaagtgctgggattacaggtatgagccaccatgcccgtcctttttttgagacagggtcttgctctgtcgcccaagctggagtgtggtggcgtgatcttggctcactgcaacctctgcctcccaggtttgagccgttcttgtgcctcagcctcttgagtagctgggattataggcgcatgctatgacacccagctaatttttgtattttttttgtagagacggagttttgctatgttggccagggtggtgtccttgacctcaagtgatctgcctggcttggcctcccaaagtggtgggattacgggtatgagccaccacacttggccttagactttctcttactttatatatatttaatctcagtccttaaaataactgggtagataggaagaaactgagacagaaattaggtaaataaggcccaaggcagttaaataggataaaagcctggactgactgtgcttttaactcactaccctgtactgtgaaaatttacctatattaattatagaatcttaaaattctggactgagtgtaagcagtatgatgtaggtaatgactttagaattcaactgcagtaagtaggttaatattgtaagaactaatttgcttttctgaagtaatttaaaatgtgtgaatatcctatatgaggggccttaaatataactcactcagttctttctcaaagaaaatgagaaaaggaatggtaaatgttaacttgcaggcctcttttttttgttttttgttttttgactcttaaagcactttacttatttttaaaatttaattaattttttgtagagatggggtctcactttgttgcccaggctggtcttgaactcctaggttcaagtgatcctcttgcctcagcctcccaaagtgctgagattacaggtgtgagtcaccgtgcctggccttttgaagcactgtaaaacctgaatatatgggtagtgaggatataatcggaaccagaataaggattgtttttaaatactgagttcttcagtgtactgtgaagtgctgggaggtactactaaaatgtatctcttcttttctcttcattattaatgctactgccaaggttagctcctcccctgactgttagaatatttcgttacttctgtgggaattacttctttcatgctgcttatgagaagttgtgtgtgtgtgtttgtgtgtgtgtgtgtgtaccatttcttttcagataagtggatattcaatatgatagaattgaaatgctaaagaactataaggaaggcctttttcagtctcactcaaaccttttttcagtgtggttaccggttcttgcacccaccctggttgcttaccatattgcagctttgttacttgaatagtatttcagtttttaacacatttgtttttgtgttggttctgtttcctagtatggctgttttttttgttttgttttgagatggtgagatggggtattactctgtcatccaggctggagtgcagtggcatagtcatggctcactgcagccttgaactcccaggcccaagtgatcctcccacctcaacctcatgagtagctgggaccacaggtgtgcaccccatgcccaactaattatttttgtagagataggatctcactgtgttgcccgggctggtctcaaactcctggcctctagtgatcctcccgctttggactcccaaagtgctgggattataggtctgagccaccatgcccagtcagcgtttatcagattacttaccattactactttgtcctggggaaatcctcttaatctttaaaggcgcaatccaaaatcataatgttcccgtgttacttactgttacttttttttttttctcctatagtggtttgatgataagaacccaatttgggccgggcgcggttgctcacgcctgtaatcccaacactttgggaggctaagccagatggatcacctgaggtcgggagtttgagaccatcctgaccaacataaagaagtcctatctctactaaaaacacaaaattagctgggcgtggtggtgcatgcctgtattccagctacttgggaggctgaggcagaagaatcgcttgaacccaggaggcggaggttgcagtgagccgagatcgcgccattgcactccagcctgggcaacaagagcgaaattccgtctcaaaaaaaaaaaaaaaattggagttttacagataaccacatcttattctgggaaaggatttgaagcaagttgggttttatatttggctgtacttgtcctcttcagcagtataataagccccttaaggctgaagtaaccttattcctattgtttagtagctaatagcatgcttttgatatgcttatgatcatactaataatttaatatttgaattgtatggaagtacaattcagtatcattttacatatggtatattgtgatgctgtatcatattttatgttacggtttataagaaaagctcctaggtataaaatgctacatagcaggaacttggtttttcaatgttattatttcctactgtttttgacgtaacggcaataaaatttgtttgaaccaaaatggactaacaattatttgtacaactcagtattgtctaaatatcatattgttaaatctaggtttcttgaattctccatcaagcctggtcatgtcatgtagcatttggtgtctcaccatgcccaacagatattttgtgggaggatggagttgatcttcctcatgttaaaagattgaagggagtgttctgacttaattgataacagtctttcataacttcacaaatttttgagaatgacccaaggctaactgtgggaaaaattcacataaaaacatagcctatctatgaggagcaaaactatatttcagttgtgggctttacatttcatttaaccctcttaactgtcctgtgaaatgggttacagccttattttatagatgaggaagctgaagtttaagggatttgcatacggtcacgtaactagtgagttgtgcagctagggttagaataaacagatttattttttttttttcttagaaacagcaattaacaatgtgactcctaatcaaaagaaaagagatgtccttggggcttaaagtactatggtgggagtcttggactgagtaggtttgaaaatacaattttatgatcgtggagtactaggatttagtcattttgatgcagagcatttcctgatcaactgctgttgtggagtgtactgtccaatagaattctctacaattaaggaaatgttctgtatctcaagagattgttcttaatggtggccagtagtcatgtgaccgttgagcatttgaaatgtggctagtgctactgaagaatggaattgtaaattgcttttaatctaaattttgcctgtgatattattggctgtgggtttgccaaaatttgtttttttaaagaggaaaagataacggactgttggctgctttattggacagcacagctagcatatagatgcagataggtagtataacttgtttgtagtttaatataaatgttgtattttgtaattaggccaaatttgagtttcatcatggtgactatgaaaaacagtttctgcatgtactgagccgcaaggacaagactggaatcgttgtcaacaatcctaaccagtcagtgtttctcttcattgacagacagcacttgcaggtaagcagcttttttgaaaaccacttacaggctcattcaaaaacttattggttagtaaacgttttatatacaagttacttaattgttgtgtcccccaaacactgcattatttttgaagttatttaaaaagcaaaaaataggctgggcatggtggctcatgcctgtaatcccagcactttggaaagccgaggcgggcatattgcttgagctcaggaattccagaccagcctgggcaacatgacgaaaccccatctctacagaaaatataaaaactagccaggcatggtggcgtgtgcctgtagtcccagctactggggaggctgaagggggaggattgcttgagcttaagaggctacagtgagatcttgtcactgcactccagcttgaatgacagaacgagaccctgtctcaaaaaataaaatgaatttttaaaaaagtatttcccaggcctcactgtagaacaatggttcccaaattttgctgcatgttacagcaacctggcaagccttttttttttttttaaacgggaaaaaacccacctccttcgaagcttttaaaagtcatgattctagtgaacagtagtgagaactattgccctaaagcgtgtctaccagatgtgtgggcaatggatgaacatcacttgagaacttgttaaaaatatagactctcaggctctactaatcagagtctgcactttaaacagaaccctcaggtgatttgaaacacactttgtttccagaagcactgacctggacgtttttttttttcttgagagggagtctctgtcgcccaggctggagtgccgtggcgcaatctcagttcgctgcaagctccaccttccgggttcacgccattctcctgcctcagcctcccgagtagctgggactacaggtgcccgccaccacgcccagctaatttttttttttttttgtattttagtagagacagggtttcaccatgttagccaggatggtctcaatctcctgacctcatgatctgcctgccttggcctaccaaagtgctgggattacaggcgtgagccaccgcaaccggctgactttttaaatctaaaaggatgagggacatatatttaaaagatccacatttatttcaaataagcacttccatttgggcacagtgtctcacacttgtaatcctagcattttgggaagccgatgggggaggattgcttgagtccaagaccagcctgggcaacagagtgagacgacatctctacaaaaaatcaaagaaattagccggacattgtggcgtgttcctgtggtcctagctactctggaggctgaggcaggggagaatcacttgagcccaggagtttagagttgcagtgagccatggcaccaacacactcctgcctgagtaatgcagcgagaccccatctcaaaaaaaaaaaaaacaccgccaacaacaaataaccacttcccagttaagcagcaatccaagtattgcaatttagtttttagatgcagccacttgctggctgtatgatcttggacaggtaactgctgtgagcatgttgcttctgtgaaattgaacaaatgataatcctaaggttgttaaatttaacgtaaggttgttacatttaaaattaactaatacaagtaaagtatattacatatgtataggtttatttacatttgtaggctacttcagacatcttcaaagtcagagtccttattttgccttttagaggtgctagatagtgaagaaaagatgaactttgtaattaagttggatgttcaaatggtaactactttttaaaaataagggttttgatttaactggtaatactttggcttttttctagtcccttaccccaggatatgcttaaatcttttatttattttttgagacaaggtctcaactctgtcaccacgctggagtacactggcatatggatcatggctcaccgcagccttgacctcctgggcgcaggttatccacctcagcttcccgagtggctggactacaggcgtgtgccaccacatccagctaatttttatattttttgtagagatgggttttcgtcatgttgcccagaatggtcttgaactcttgggctcaagcaatcctcctgactcagcctcccaaagtgctgggattacaggtctgagccaccacacccagccttaaatttttacctattccttcatcctctcactagcttctattcttaccacatctgctttatcttcctctatataaaaatgacttcaaacttctcaaaatctgtccccatgaaatgcctttagctttaatttcttctagcaagtagtctctggtttacttccctaactttttatcttctaattctgcataaatttttcctttatcttatatggcaagattttgtctgtctagaatatggatagggactacaatttgtcccttactctgtatgttaagatgtttaataaattgtgggaaatggacttcatgtgacagttacgctaaagtcttatttttaaaaaatattaaaatgttttccccttccagactccaaaaaacaaagctacaatcttcaagttatgcagcatctgcctctacctgccacaggaacagctcacccactgggcagttggcaccatagaggatcacctccgtccttatatgccagagtagagtactgaccagcaaaatggagaagatcagagaatgcagcagcagttttttttcttgttttcttaccactttattctttcagagtttaaagaaaatggactcatgcacagaacactatgcattttgaaacttgttcatcctggatttttttaaatcatttttatctcagaacttaaacaaaaattagatgtcgtgcacggactgtgtgaaagaagatgctttgcatatttgctgcactgcatcagtatcttactaaaaatgtgaaatgaaaggactattgtacactgaaatgcttaaatgtatctgaaagcacaaggtgatactcatttttatggtcttcccatttgtgctggtttttgcctctttgacatctgtcatcagtatttagagggtgagaagtgaatgtaacaggtataaataacatttttaaaaacaataactttgctataatcacagttgttccagagcactgtcagatacattctaatgaccagaactggtttaaaaaaagaaaatacaaccatgggaaagaaatcttaaatgaaaaacgcatctcattgtaggcatttttgcctcatattttactgggccatgtttgtttcctggtactcatgtattttttttttccagatctctttccccaagttgctattgtaagagtattctgctgcgtgtggatgcagttatacacattaaagcagatctggagtctgaagtagctataaagcagctataaaacagaaatacatgcatagctgcagaaaccatgataggtagaggacttttcttttggttttgttttgttttggtttgttttgtttttggttttacagagaagagatttttattacaaagaaaaaaattccagtgaattgtgcagaaatgctggtttttacaccatcctaaagaaaaactttacaagggtgttttggagtagaaaaaaggttataaagttggaatcttaaattgtaaaattaaccattgagtgtcaaagttctaaaagcagaactcattttgtgcaatgaacataaggaaagactactgtataggtttttttttttttctccttttaaatgaagaaaagctttgcttaagggttgcatacttttattggagtaaatctgaatgatcctactcctttggagtaaaactagtgcttaccagtttccaattgtatttagcttctggttggaatttgaaaaaaaaagaaaaaaagaaaaagaaaacctaaataaaataggtgaaagttccctgactattcaggtgaatacacaaagtttgaagtgttaactttttctttccatttcactgatgttactggtcaccttagagaattatttcatagtctgtggctaaatagtaaattcagaagaaaaatacctggcaattgagtgtgtaacttcaacaagaacaggaatcaagaacatactgtcagctttcaacagttagcaacctggccttatgccttgcttcatgggaaagggccattcttaaatttcaaaatgctttcatgtgtcctcttatttaaaaattagaatctatttgaaataacattttgaatgtttattataaccaggtactcttctaagctcttgtcttaacctctcaacctttggtggaaatagatgcagaggttaagtaacttgctcaagctcagatcataagtagtggaggatttaaaaccaggctggctggctcttaaggcctatgctcttaatttaccatgttgaattaatttaccatattgaattacacttatgttcaccaagttaggcattttggcagccattgtttacgtttttattttggaataatttagaaaagttaccagagtaatatgaaagctgttgtgtaatctttaccctcatttttattattttgccacatttttttcattttctctgtacacttatacctgtgagctatttgagtttgttgcacactttgtgcttccttaccccttccttagtacttcggcatatgttccaagtacaagaatatttcatataactagagtaaaattaccaaactcagggaatgttgatactctttatcatccatattcgttttgttgtcccagtatccttggtagcttgttttagatccccccctctagagtacaggatcattgaatttagttgttctcagttgtctttaatgtggaacagttccttagcctttatgtgttccatgacctctatgttttttggagtacagggcaatttttcttgtaaattgttactcattttgcatttgaattgtttattcatgcttaacgcccttctcaagtatactctccatctgctcttcattgatgttacttttgagcgcctggtcaaggtgtcctggttttgccctatgtgtggtacttactactagcaatctctgggaagcaatgtgcaaataccctgttcctttatcaggagctcccttggcgattctttccagactaaaacccaaaccagtctttaactatgatggttacaaaatagtgattttccaaatctaatgctttgtccatttacagcatttgttgtaagagagtgttctatctctgccatttattatctacctaaacactatggcctcatattttttccctccaaatcataatttgcatgcctttattattttgagcatctcctttcatgcataagatactgtaacctttctgtcccagcctcaagccctggagtcagctgtttctccaaggagcccagcttccttttagtgggaaatactagaagtaaacatctgggactcctgtatgctcactgctgctattgctactgtggagtcttctgccctttcacagtggacagatcagcaggcgatctaatgtagggaaaggatttgtctttaactgttaacttgacttaaatttacttaaagctgcatcctttttagtctttagtcatgaaatgttcattaagattccctgacagaaatcaagtaagagtcagctgggtgcagtggttcacacctgtaagtccagtacttggggggccaaggcaggaggattgcttgagcctaggagtttgagacgaggctgggcaacagtgagaccttgtttctacaaaaataaaattaggcgtggtggcacacgcctgtagttccagctactcaggagactgaggtggaagaatgtcttgagcctgggattttgaggctatgggaagctgtgattgtatcactccagcctgagtgacagaagctgtctcagagtgccacagtcaactgaacttggagacttctgagaagtgaacttggtcttttcaatactatagacttggaggtttgagatctgcatggttttattctcggtacaagaaaaggggctagtagcatgctttttttcttccccctctattggaccatttcctgtaacactaacatgcttagcctcaaacttttcttgaggtcttttttaggcatatggctcaatctattttatttttcaatatgggctgtagttcatatattttgaagtttcataatcttaaaaaaaggaaatgcaagtgtagcttggcattttagatctgggaaggacctaagattcgctaaggattggccattgctgtggtctccatgtgtttcccctaaatttgtatgttaaaatcccaacccccaaggtgatattagcaggtgggggtctttgggaagttattagatcacgagggcagaaccctcaagattggagtaagtgcccttacaaaagagaacccaggctgggcacattggctcacacctgtaatcccagcactttggggggccaaggcaggcggatcacctgaggtcacgagttcgagaccagcctggccaacatggtgaaccctgtttctacaaaaaactacaaaaattagctaggtgtgatggcacatgcctatagtcccagctacttgggaggctgaggcaggagaatcacttgaacccagggggcagagattgcagtgagccgagatcgtgctgctgtactccagcctgggcaacagagcgagactccatttcaaaaacgagaacccagagggctcacttgccccttccaccacacagtgagaaggcaccatctatgagccaggaagcgggccctcacctaacaggatctgctgggccttgacccaggactttccagcttctagaaccatgaaaaatttctgttgttcctagcagcccaaacagaattagaaccattaatttctatttctcctttagcttaacactggactttagttttaatcttaactgagagtggtcctgctagtttctttgctttacctgtttttaaaacactttgagctaagaatttttcacccaattatcacacatgattagaaaacaagatgcttaaagtgaaaaaagacacccccacctttaccctacttgatatccaggtccttttcctccaagaatatttctagctgcttctggttttgctagtttatttcaaaaattacaattgtttgagtcaaatctatacttgatattcattgttgggtttctttaggtcattctgctgttctctcagtttcccaggtgttttgtgtgtcttccttgtgctattaattttcctgtggccttgttggtcagatccacagaggtaaatgcaagtgtttttccttgcttcagaacatgtgctgtaatcactatatcttctcctaattttgcaggtgacatgtaccttgaaagaaaatgaatatagttaacagcagataatttttcaaagggaaagttgtgtgcatctcacaacagtgttcctatgtaacttattttactcctaaaaatagttttaacggtagtattggtaagctttctgtactatcaaatgtgaatggctggtcctaaccaggttctattttacccattccttacccacacaagtttcttttcccaaatatgtgagaagaggttttcttgcctccccttttttccctttacatttcccacttcacatttatttggggctggtgaaagatttcctccagctttcatttaatctccttaacttcttagatgaaatatcacttggtgtctgtatattgtcctatccatatttacaatttatttgactctaaaatgacaatataacaactataaggaattgatatgatgtccttacaatcttgatgatggactgtctatatttttaagagatgtacatcctagtcacttgtaatcataagttgtctttaactcagctggctccagctaattaaaaaaaaaattggggagatgaggattgtttaaaacaaatgttaatgttttaaagggaaataatttccttacagtttatttttatgtttctgctttttagaaagaaacctttaaaaaggatatgtatttttgccatattcaaaataagacttcagtatttatggctaggaggtataagaaaggtggatctggccgggcacgatggctcaagcctgtaatcccagcactttgggaggccgaggtgggcagatcacctgagggcaggagttcgagaccagcccggccaacgtggtgaaaccccgtctcaactaaaaatacagaagttagctaggcatggtggtgggcacctgtaatctcagctacttttgaggctgaggcagaagaatggcaggaacccaggaggcagaggttgcagtgagccgagatcgcgccactggactccagcctgggcaacagagcaagattccatctcacaaaaaaaaaaaaaaaaaaaaaaaaaaggtggatcttattgctggaaagaacaggcttgtctttaattcacatacctcaatgtaaagaaatgaaaaatagtatgtttagtagtagtttggccagtttttattatttccctaaattttgtcttagaaatcaagaattttggctaacagccattaacttaaactgagggaagataaggaaccctttgtgctacagatgagtaaacattaagtccggggaatttggagattgacattttgtcagtaatactctaaaatttccccttttgttgttttggaacctcgcttgtttttaacctaagtcacagtctaacaggcatcctcagtctgtataatataggacttgatgtgcaggggtggagtaaatttggtaccatgtcaagtaaatcaaagagtgaatcatgaagtgttaactgactgaaacattattcatttacttttgaaatatctctaacttttgaaagaccatgtcctagtttttgttgaagtgaatcagtttttgaagcgtaggcagctcttgatggccaatgcttttggcaacacatatttgaaaggccaaaactatgtttgacttactgaaaattccttagggttctaaaggcaaaagtaccttagtagatcatgaaatgcagtgctaggtttgaagatctctctgctcttaatagagacttttagggaaaatcaagtcatctactgatctcacctcttaccacatgaaataaggactgctgaatatgcacaccagtaacataagcagagcctttcttttctgtacatcttaatttcaaaaagagcatttggctgcatcttgtaatttgcttattgtaccctcaatttaagttattcccatgaagagggactgaatgtttcttaagtaaacttgataaaatatttagattccttaaaagcctacattggctgggcgcggtggctcacgcctgtaatcccagcactttgggaggccaaggcgggcagatcacaaggtgaggagatcgagaccagcctggctaacacggtgaaaccccatctctactaaaaatacaaacaaattagtcgggcatggtggcaggcgcctgtagtcccagctactcgggaggctgaggcaggagaatggtgtgaacccgggaggcggagcttgcagtgagccgagactgcaccactgcactccagcctgggccacaaagcgagactccgtctcaaaaaaaaaaaaaaaaaaagcctacattatttccattaccctcatatctactcacaatggctctctcaacctgacctctcagttagttacatttttgttgcttaggtggaaaaagcagttgtcttgaaactaaatccctgtgcccagctctttctttattgaatggggctgcagtagtaccagtttatgttggaattgagtttcttacattttggaagtttgaccctgaggggcactgttccctgatcatgtagtttaactcacagaacatgtctgtgtagtcacagggagagatccaggattgctgcccattcttaaaactcaacactttgggaggctgaggtgggtggacactggaggtcaggagttcaagaccagcctggccaacatggtgaaaccccgtctttactaaaaacacaaaaattagcccagcatggtggcgcacacctgtaatcccagctactagggaggctgaggcaggagaattacttgagccccagaggcggaggctgaagtgagccagattgtgccgctgcactccagcctgggtgatggggagactccgtgtccaaaaaaaaaaaaaaaccccagcaatggtgttcagtttgttagagtaagattataatgtgtatatgaactctaactttactttgaattgtatgtactcaatacaatcctcatagtgttataagtggtatttttaaaattaaataatatttattttttgtagagatgggggtcttgaactccaggcttcaagcaatcctcttgcctcggcctcccaaagtgctgggattataggcgtgagccactgcgtctggccctgaatggcacttttaaggactgtatgaaacagttatgagccatcagtttgtgatttttccccctgcatcagtatacacattaaaagctgaatgttgctcttttgaatgtttgggatcattccctttttactattgatacacactgtacttgcaaattaactgctctagttctagattttaaggctggaatattttaggacaaaatctataggtgcagttaaggagataagcagctaattgaatctcatgcgttactaataatataaatgtgtttagtctcagttgtttagacagttatcacacagaagggatttggaatacagtttggatacatacgttatgttcatatcgacactgactccgggtgctcccctttccgtgcatagcagagccattgttgatatgttatctactaacgtggctgtcaaaccgccgtggagagtgcctattgcattggtatgctcttcttctactttcatttcacaaatcactttcccaggagcagcagagacaagagtaatct

SEQ ID NO: 1708 - DNA, 1346 bp, Homo sapiens
ggaaggcctttttcagtctcactcaaaccttttttcagtgtggttaccggttcttgcacccaccctggttgcttaccatattgcagctttgttacttgaatagtatttcagtttttaacacatttgtttttgtgttggttctgtttcctagtatggctgttttttttgttttgttttgagatggtgagatggggtattactctgtcatccaggctggagtgcagtggcatagtcatggctcactgcagccttgaactcccaggcccaagtgatcctcccacctcaacctcatgagtagctgggaccacaggtgtgcaccccatgcccaactaattatttttgtagagataggatctcactgtgttgcccgggctggtctcaaactcctggcctctagtgatcctcccgctttggactcccaaagtgctgggattataggtctgagccaccatgcccagtcagcgtttatcagattacttaccattactactttgtcctggggaaatcctcttaatctttaaaggcgcaatccaaaatcataatgttcccgtgttacttactgttacttttttttttttctcctatagtggtttgatgataagaacccaatttgggccgggcgcggttgctcacgcctgtaatcccaacactttgggaggctaagccagatggatcacctgaggtcgggagtttgagaccatcctgaccaacataaagaagtcctatctctactaaaaacacaaaattagctgggcgtggtggtgcatgcctgtattccagctacttgggaggctgaggcagaagaatcgcttgaacccaggaggcggaggttgcagtgagccgagatcgcgccattgcactccagcctgggcaacaagagcgaaattccgtctcaaaaaaaaaaaaaaaattggagttttacagataaccacatcttattctgggaaaggatttgaagcaagttgggttttatatttggctgtacttgtcctcttcagcagtataataagccccttaaggctgaagtaaccttattcctattgtttagtagctaatagcatgcttttgatatgcttatgatcatactaataatttaatatttgaattgtatggaagtacaattcagtatcattttacatatggtatattgtgatgctgtatcatattttatgttacggtttataagaaaagctcctaggtataaaatgctacatagcaggaacttggtttttcaatgttattatttcctactgtttttgacgtaacggcaataaaatttgtttgaaccaaaatggactaacaattatttgtacaactcagtattgtctaaatatcatattgttaaa

SEQ ID NO: 1709 - DNA, 2177 bp, Homo sapiens
caaaagctgacgacttcggtctgcgccggaagtgcatgagctgccgatgtggtgcttagtgattgcggtttcggtcgctctcccgtgtttcccgggctgggtatttgcctcgcaccatggcggtaaggaggatggatagggcggggtccgcaccagcaaagctctccaggggctgtgagagtgaaaactgagaaagaacattaagggatatggggtgggccagagcggggcgccatccctggccagaccgtgctagagctgggctggggggatggcggcgcaggaccataccaggactagtgccagagcggggtgggcatcagtaccagggcaggccagagatctaagtgacctgaggtgggggttaacccagatcgggactacgccagcggaggcctgagagaggcaccattcaactccgctcaggagtacccttggaagagtcgttagcctaaagccagactaccacgggatccagaggcggtattagcttaggattgaattgttccagggcgagcaagaggcgattgatcctagctgcgggtgctggagagatggcgtcagccctaggcagaatggactggaggatgggtggacatcccagggattttgctaggtttctgcactacggggacctggctgagttgcggatggagctctatagctcaccaggctggtggggagaatgaggaggaccgtggcctcctgacggcatctcatcattcctctgcagcccaagggcaaagtgggcacgagagggaagaagcagatatttgaagagaacagagagactctgaagttctacctgcggatcatactgggggccaatgtaagtgcctacctccttgcttctatgcccacttatagtcagttccctagtcctcagccctgcttggtgacgaggagtggtacccgaaaaagctctagaagagagctccagtcaaaaagaaatgagagatctgggcacagagaaagtgctaactagtaaaacacaaagaaaatgaaggcgtgagtcgtagctgaatttgagagctcttcctacctccaagtacacaaaggcttctttcctgggctgagttgggtgtcagaggagagtgggtatttgggattcagggagcagggccctttcttcaaccctgtaagaacaaccttgctcctcccacagcctggcctaattcttggtcagagttgagggagacccatggtttggaggtaacttctgaccccaacctgatcctgtgattgcttgcaggccatttactgccttgtgacgttggtcttcttttactcatctgcctcattttgggcctgggtaagtatctccatcctgggaggtggatgagtgcgtagggtcagtggctggcctttgataccctcattcttgctctgcagttggccctgggctttagtctggcagtgtatggggccagctaccactctatgagctcgatggcacgagcagcgttctctgaggatggggccctgatggatggtggcatggacctcaacatggagcagggcatggcagagtgagtgtcccccaccgccagcccaggtgagcggccccagggctggggcccagatagcccaagaagcacagctacttgtaacttgaaaagggtggaagggagttgcaacttgaaaagggtggaagggcccatatgctgtctttccagctttatttctatccacaggcaccttaaggatgtgatcctactgacagccatcgtgcaggtgctcagctgcttctctctctatgtctggtccttctggcttctggtatgtgggctgggggcgctcccaagaaggggcatctaaccctccccatcttttattccctgcatcttgcttcaagttaccgtttctcttgtaggctccaggccgggccctttacctcctgtgggtgaatgtgctgggcccctggttcactgcagacagtggcaccccagcaccagagcacaatgagaaacggcagcgccgacaggagcggcggcagatgaagcggttatagccattgacattgtggccacaggccactggccctgggtggctctgtcagggtgcacagcccctcatgcctggagcaatgagggtctagtccaggggccaaaagcagtctgaggtattgggtatacttatactctatagggtcgttgaataaatggcttagaatgtgg

SEQ ID NO: 1710 - DNA, 2177 bp, Homo sapiens; identical to SEQ ID NO: 1709

SEQ ID NO: 1711 - DNA, 8925 bp, Homo sapiens
gttggattagctaagaaaattttattttgctccgtgcgttcaaggagctcacacacatgcacatgcatatgcatgcacacacacacatacacacacactcacatgcatacacacacggctaatactgctcaaggcatggctcctgggcacagagttctggggccagaattctgctctgggccctcctcactctgtcatctcctgcactgcagtccagggtccagatagatttccgggatacagcaccttcacacctccaggccaggacccttgcttagtcccagtgcctgcaccaggtcatctccgagcccactcttcaacgtccttctcactgcagggacagagcagggttggagggggttgatggggttcaggtgggcagtgggattgtggggggttacttacaagacttgcggttgccgcgggaacgcttgcgttccctagcagctaaggcacgaggactgctcttggtcactgactgcaccagaaggtccatgatctcatctgatgtatcactgggtaaactggagcctgggggttcttctggggatgcagtggagggccccactgtgggcatgattggggagctgctctggaccatgcctgaggaaggccagatagcaaagtcaggccaaggtggcactggagcccattccccacagctgctatgggcctcacctctgctgcggcgattgtgtgtggtgtcctcaggcctgctggtcagcagactcttcatactagcatgactgtcagcatctccccggcctggcccgctgctcactgctactgggacagaggggttgctgggggcttccccagccacacctgagaacttctctgtctggagaaagaagaagggtgagctgggaggagcgaaggaaaccaaggaggtggcagtcaagactaagacctggaagggcacccacctcggtgatcatgcgtccccgggtcttgttgcgctcacggtatgtggcctgcttctgctgctgctgtagcactcgttcccggcaagtccgatactcaagcgcaaattcccgcagcgtgtggcagaactgcatgatgcgcacttcacgggccgcctgcggggtgtagcccaggtagagcaggaaggcatggaacctaggcaggtcagagtagggagggacagtaagtcctgcttattgtctgagggagggtggtggccgtcctgcctctcttgggtccatgcccctacctattgcagacacggcggtgcactatccttagcatggcaacacggcgggcacactggtccaggaagtgggtgaggcgggcacgcagggctggggccagctcatgcttggccaagctccgcaggctctcctcggctgcccggctccggcgctccagctgccccaggttctcagtcagctgttcaaagtccacctgagaaagcaagggggtgcacatactgtccccccacaccctgtagacaagacatggcccgaggctgcttctgggccagagtggccagcttgggccctaaggacacagacatccaaatctcatagactagtgcaagagacacaagtccatctgatgtgaatggggagcagaaggtttactgggggaagtggcagttaaacagacccaaagactgagtaggtgtggccaggccaatagaggaaagagcatttctggcagagggcatagctcacacccaggtggctggagcaagccctggcacagcagcccaaatggggagaagggggaggagccaggcccaggaagcagcgctcctcatgccttgtccggccttggttgattctggcaggtgctaaccttggcacagcgggtcagggcagggatttctgaatagaggtcagaggactcaggccgggtctggagcactagggagcagagatggtgtagcagtgactgtcgacgcaccgtgtccttcacctctgacaccttctccaggtagctcagctcaaagccgctgctctgaaaggaccctttctgagcctgggcctggttggctccagaaccctgactccccctagtccccatgtactctcactcacctgggagccattgaggaagttgcccaccgctaggagggtagccaggatgcagcggaaggtggcattctgtaccagctgttccatacccactttcaggtcaaacagtggctcagcaatttcctggtatgggagaccagggactctcagactacatggtcatgatgcttacctgtccctactgactgtcccactccaagacccaggtacccgctccatgctgtcatagtccagcttgaaggcccagagttgtagacgagcagcgaggccgccaatggaggcaagagtcatcaggaagttctcggctgggcccaggggtatgtcagggttggccagctgggcttcctcaatcttctgccgctcttcctccgtgggcatcatggtcagtagcttctgaggatgtagccagagcctgacatggccccctcaatgcaggcctgaggcctgaggcattggtcttgacccctcagtcatctaggggaggccccagtgtctggggactgccctgcagaaatgccaagcccatgcccaccaccagagggacaggaaatgcccacctaccaaaggagaaggccagacctccccccaacacccatagctgggtgacctcacctcaatgccatccttgctgacagcaaactcatcaaagttgagcagagcagccttaatgacatgcacaggtggcagtgtggttaggccgatgttgatggcgttgctgcgcttggggtccagcactgtggtcattgtccggcggccctctccagctttctgcatggttgggggaagggcagtgtaagactgaggaagggggcctgacgcggtggctcacgcctgtaatcccagcactttgggaggccaaggcgggtggaccacgaggtcaggagatcgagaccatcctggctaacatggtgaaaccccatctctactaaaaatacaaaaaaaattagctgggcgtggtggcgggcacctgtagtcccagctactcgggaggctgaggcaggagaatggcgtgaacccgggaggcggagcttgcagtgagctgagatcacaccattgcactacatcctgggtgactgagcaagactctgtctcaaaaaaaaaaaaaaaaaaaaaaagactgaggaagggactagctgggacagcaacctcagagggcactccaaggccctcctctagattgccaaatgatcccacaactgacaaactggcaacctggaatgtgtaagtcatggggatgagcttagattcttttgagacagggcctggctctaccatctaggctggagtgcagtggtgccatcatcgcccactgcagcttatcttctgggattttcctgcctcagcctcccaagtagctgggattacaggcgtgtaccaccatacccaactatttttttttttaacatttttttttccgcctcccaggttcaagcaattcttttgcctcagcctcccaagtagctggtattgcaggcatgagccaccacgcccagctcattttcatatttttagtagagacggggtttcaccatgttggccaggctggtctcaaactcctggcctcaagtaatctgcctgccttggcctcccaaagtgctgggattacaggggtgagccaccatgcccggctaattttttttttaacatttatttatttttatttatttagttatttttgagacgaagtcttgctcttgtcccccaggctggagtgcaatggtgcgatctcgactcactgcaacctctacctcccgggttcaagtgattctcctgcctcagcctcccgagtagctgggattacaggtgcccgccaccacgcttggctaattttgtgtttttagtagagacggggttttgctaatttgaccaggctggtctcgaactcctgacctcaaatgatccacctgcctcggcctcccaaggtcctgggattacaggcatgagccactacacccagaccaacttttagtagagataatgtctcactatgttgcacaggctggtctcaaactcttggattacaggtgtgagccaccatgcccggccacatttagattctagttggggcactgctgatcccttgttaggagaccttggacaatttcctactcctttctttgccttggtttccccatgtgggaagtgagtgactagctccaacaggtcagatccttaagctctgattccctcctgcctcccttggggctaccttgcagatgagtggatttaccttggagggcagcacctctttggcacgagactcaaagaggtgttccagtcgggccgtgtccactgagacagggtccagtgaagcccagagggtggcgcagggcccaaagcggcttgcagagactccatggcccccagccagcttcagctcacgccagaaaagttttactgtcttcctcttagtggggagggctgagctgtcaggcactgaatggggaagaggggcagccagaggtagaggtggaggtggtgggaaggggcctttgatgggtgggggaggtggaagtgggggaggggggggtactcccgagagcaggggcagtgggggtgagggagctgggatgtctttcccagcctccacagactctacattcagcatgtcctggtcttcatcctcccctagatctgaaaagtccaggtccccaatagagagcctgggtgcacgggtagggagctcccagatgggctcagccttggggcttgctggtatcagtggctccttgggctctggtgcaaggcttcgctgggcccggagcaggacacagggggcagggctctggggtgttctggctgcaggggctgtctctggggagtcccagagttgccgggcatctaaagaaagggaaggagctgtcagtgccatgccccctgtggggcaacaaagcaacaggcaggctctgcctgctcacccacctactcacctgggtgtccacccgcctcattgggcatggccccggcaagtgtctctgcccggccctgggccagcgcaacctgcttctctgtttctgctgccgccacattctccaggaaccgggctctgagggaaggtgcttgtcactgacagcgtctgacacaccccagcccaggtgtacatgccttgctgagcccctggacaccacccccaattgcaggcacgcacagacacacagggaacagtccatgcgctgagcagaccagaaccacaccccccccaaggccagcccctcttcagtcctccacatctggggaggattactaccaacccagcattcccaggtgaaaacacagggagaggatctacttaacatctaacttgcaacctcgttcatgttcactgtcctggtttttttttggttggttttttttttagagacagggtctcactctgtcagtcacccaggctggagtacagtggtgtgatcatagctcactgcagcctcactctcctgggcttgaccctcagcctcccaagtagctgggactacagacatgtgccaccacgtccagctgattttttaatttttttgaggagacagggtctcactgtgttgttcaggctggccttgaattcctggcctcaagcagtcctcccacctcagcctcctgaagtgctgagattacaggtgtgaatgatgcacccagccaaattttaaaaaatttctttgtagagatgaggtcttactgtgttgcccaggctggtgtcttgagtctagacaaggactcttagagcaggggaaggggatagctgtcccaatgggcatatcaggctgtccctcccttggcatgtctggtagcttctgggagcctatgcccaggaaagggcctggtaaacaggccaggtgcggtggctcacgcttgtaatcccagcactttgggaggcagaggtgggtggattacttgaagtcaggagttcgagaccagcctggccaacatggtgaaaccctgtctctactaaaaatacaaaaattacccaggtatcctggtgcaggcctataatcccagctacttgggaggctgaggcaggagaattgcttgaacctgggaggcagaggttgcagtgtgctgagatcacaccactgcactccagccttggagaccgagcaagactctgtctcaaaaaaaaaaaaaacaaaaaaaaaacggatgtggtaaacagtggaccctcagtttatgctgaaataatgggtgcaatccagtgtttcttttctggcccctccagcctctgtcagctctcagtccctgcctttccctcagccttaggttacccctccacccccacaccacacaccacacagcaccctaggtcccctccctgctcgcttctgagctgaagacttggcagaatgagccccaggttgggtgtccacatccccatctctggctgctaaggtgttgctattgaagcacagggaccactgtgaccccagtgaattggttcccagtgcttagcctttgggttaccgaggaggcatatgtctgggagaggataggcctgagtcccccagctttggttgcatcaggcacgtgaaacccctgctgggggaagcaatgctgaagccctgagcacatggcaggcctggcaggccggcctctgtacttactccagcctggcctgcccaggaggggactgggggacgggtgggctctcaggggccctgggtaggggggatgagaggaagagatggtaactgtggtgtcagctccatggttgctcatacccacacagagctaggcagtgatattggggttccttcccagccgcagtgggaagtgggggaaggtatgacacgaggaaactggaagtggaggggagagactgacgtggagcaggacagggtgctggaagagacagaggcagcagaacaagggagtgacagatagtgggcgggagacatgacaagaggcaaagacaggcagaacgtcggaggagacaaaggaaaccacaggaggaggagatccagtcagagccgaaccccacccgctggcagtcacttaccaaacggaagcagtttggtgaagtctggaaagagagagagagaaagcacgcgtttgggcagaggaggctgagtgcccatggaggggcgcaaagcggagggacaatgggagagaggactccagggtggcctctgtctccctacttacttgtagatgctcctctcgctggaggtgtcagctgagggtgccacagagatggtaggaaaaaggttcactgaagcttggagaccggagggagggcccacagggctggaggcggggcctgtcagcagggcggggccggtggaagaggtggggcctaccggtgaggcggggcctgtggggctgaaagcaggggctgtcagtggggcggggcctgagaagctggaggcggggcctgtcagtggggtggggcctgcggggcgggaggtggggcatgtcggtagggcaggcccagtggaggaggtgggggctgtctgtggggcggggcctgagggggttggggtcagggcctgtcagctcactgggccatgcctagtagatccaccctttcccatctacagatgctcgtacttacccaggttccggggcacgcgcggggcagcccccgccttccagagaacggcggctcctcttgccctcctcagaagaaggctttcgtcgttcccgccgcccaccagcgcctggggcttcttcgatgtctccatcctccaatttcagggcgttctagcagaggcggaccaggatgtaagaaagtggttaacgtgtatgcaggtggggtggggcgctggggactgcgcttctctcttccctctttccaatccgcctcagagcgtaaggcccggcccacctcgtagagcacaagctgcgtgcgcaggtcgacgtcagtgcccgcagtgcccaggtggcgctggaccagcgcttccatgccctgctgctccagtgcatccgtcacatcgtagaaggagtcctggtccgggagcgccgccagcgtctggagggcggggataagaaggcaaggctgaggttggtggggaggtcaggagcctgagcatcccagagctggcacccagtccttggccacaccttgttgatgagggtgaccgtgtacaccaacaactcagggtcagcgccattcttctcctccaggatggacaccagattggcccagggaggagcacctgccacacagaaagtggagcagtcatgggggaacaggtaggagagagggctctgagcggtggggggagaaagggacagtctctgaccggtggtgctggccacagagttcactgcacggatgaacagcggtgcgttgttttcggagtattctacaaacaccaacagcagcttcagggctgtcttcaccaccaagcgggactgaggagagaggtcagtacatatgagtggggcttaggccagacctgtgccagctgttgctggggaaggggaagggctgctggggctggacccagagagaatctaggcagaatgaccctggccccaggcccaggcactgaagtgccttataggcttacagaggcctcagactcactcccttccagctcactttgcagaacaggaaactgaggcccagagagaagcaacaggcaaagggtataaggctgagtggagagccacttaccaggctggcacacaatgtgtacagccactgaatagtgtcactgtgggccaccacccccagcattccatccacaaagagcatcagctggccgagcgctggggaaacagggatgggcagagtcagcgagggtcgctggagcagaggtcatgggagaggggcggggctgacctctaaggatgtagctctggtagttgtggtcggcagcagcacccacacggatcaggcagctcagcccctctgaatgcacaaattcaggcaccaggtctttgtcctcctaga

SEQ ID NO: 1712 - DNA, 8924 bp, Homo sapiens
gttggattagctaagaaaattttattttgctccgtgcgttcaaggagctcacacacatgcacatgcatatgcatgcacacacacacatacacacacactcacatgcatacacacacggctaatactgctcaaggcatggctcctgggcacagagttctggggccagaattctgctctgggccctcctcactctgtcatctcctgcactgcagtccagggtccagatagatttccgggatacagcaccttcacacctccaggccaggacccttgcttagtcccagtgcctgcaccaggtcatctccgagcccactcttcaacgtccttctcactgcagggacagagcagggttggagggggttgatggggttcaggtgggcagtgggattgtggggggttacttacaagacttgcggttgccgcgggaacgcttgcgttccctagcagctaaggcacgaggactgctcttggtcactgactgcaccagaaggtccatgatctcatctgatgtatcactgggtaaactggagcctgggggttcttctggggatgcagtggagggccccactgtgggcatgattggggagctgctctggaccatgcctgaggaaggccagatagcaaagtcaggccaaggtggcactggagcccattccccacagctgctatgggcctcacctctgctgcggcgattgtgtgtggtgtcctcaggcctgctggtcagcagactcttcatactagcatgactgtcagcatctccccggcctggcccgctgctcactgctactgggacagaggggttgctgggggcttccccagccacacctgagaacttctctgtctggagaaagaagaagggtgagctgggaggagcgaaggaaaccaaggaggtggcagtcaagactaagacctggaagggcacccacctcggtgatcatgcgtccccgggtcttgttgcgctcacggtatgtggcctgcttctgctgctgctgtagcactcgttcccggcaagtccgatactcaagcgcaaattcccgcagcgtgtggcagaactgcatgatgcgcacttcacgggccgcctgcggggtgtagcccaggtagagcaggaaggcatggaacctaggcaggtcagagtagggagggacagtaagtcctgcttattgtctgagggagggtggtggccgtcctgcctctcttgggtccatgcccctacctattgcagacacggcggtgcactatccttagcatggcaacacggcgggcacactggtccaggaagtgggtgaggcgggcacgcagggctggggccagctcatgcttggccaagctccgcaggctctcctcggctgcccggctccggcgctccagctgccccaggttctcagtcagctgttcaaagtccacctgagaaagcaagggggtgcacatactgtccccccacaccctgtagacaagacatggcccgaggctgcttctgggccagagtggccagcttgggccctaaggacacagacatccaaatctcatagactagtgcaagagacacaagtccatctgatgtgaatggggagcagaaggtttactgggggaagtggcagttaaacagacccaaagactgagtaggtgtggccaggccaatagaggaaagagcatttctggcagagggcatagctcacacccaggtggctggagcaagccctggcacagcagcccaaatggggagaagggggaggagccaggcccaggaagcagcgctcctcatgccttgtccggccttggttgattctggcaggtgctaaccttggcacagcgggtcagggcagggatttctgaatagaggtcagaggactcaggccgggtctggagcactagggagcagagatggtgtagcagtgactgtcgacgcaccgtgtccttcacctctgacaccttctccaggtagctcagctcaaagccgctgctctgaaaggaccctttctgagcctgggcctggttggctccagaaccctgactccccctagtccccatgtactctcactcacctgggagccattgaggaagttgcccaccgctaggagggtagccaggatgcagcggaaggtggcattctgtaccagctgttccatacccactttcaggtcaaacagtggctcagcaatttcctggtatgggagaccagggactctcagactacatggtcatgatgcttacctgtccctactgactgtcccactccaagacccaggtacccgctccatgctgtcatagtccagcttgaaggcccagagttgtagacgagcagcgaggccgccaatggaggcaagagtcatcaggaagttctcggctgggcccaggggtatgtcagggttggccagctgggcttcctcaatcttctgccgctcttcctccgtgggcatcatggtcagtagcttctgaggatgtagccagagcctgacatggccccctcaatgcaggcctgaggcctgaggcattggtcttgacccctcagtcatctaggggaggccccagtgtctggggactgccctgcagaaatgccaagcccatgcccaccaccagagggacaggaaatgcccacctaccaaaggagaaggccagacctccccccaacacccatagctgggtgacctcacctcaatgccatccttgctgacagcaaactcatcaaagttgagcagagcagccttaatgacatgcacaggtggcagtgtggttaggccgatgttgatggcgttgctgcgcttggggtccagcactgtggtcattgtccggcggccctctccagctttctgcatggttgggggaagggcagtgtaagactgaggaagggggcctgacgcggtggctcacgcctgtaatcccagcactttgggaggccaaggcgggtggaccacgaggtcaggagatcgagaccatcctggctaacatggtgaaaccccatctctactaaaaatacaaaaaaaattagctgggcgtggtggcgggcacctgtagtcccagctactcgggaggctgaggcaggagaatggcgtgaacccgggaggcggagcttgcagtgagctgagatcacaccattgcactacatcctgggtgactgagcaagactctgtctcaaaaaaaaaaaaaaaaaaaaaaagactgaggaagggactagctgggacagcaacctcagagggcactccaaggccctcctctagattgccaaatgatcccacaactgacaaactggcaacctggaatgtgtaagtcatggggatgagcttagattcttttgagacagggcctggctctaccatctaggctggagtgcagtggtgccatcatcgcccactgcagcttatcttctgggattttcctgcctcagcctcccaagtagctgggattacaggcgtgtaccaccatacccaactatttttttttttaacatttttttttccgcctcccaggttcaagcaattcttttgcctcagcctcccaagtagctggtattgcaggcatgagccaccacgcccagctcattttcatatttttagtagagacggggtttcaccatgttggccaggctggtctcaaactcctggcctcaagtaatctgcctgccttggcctcccaaagtgctgggattacaggggtgagccaccatgcccggctaattttttttttaacatttatttatttttatttatttagttatttttgagacgaagtcttgctcttgtcccccaggctggagtgcaatggtgcgatctcgactcactgcaacctctacctcccgggttcaagtgattctcctgcctcagcctcccgagtagctgggattacaggtgcccgccaccacgcttggctaattttgtgtttttagtagagacggggttttgctaatttgaccaggctggtctcgaactcctgacctcaaatgatccacctgcctcggcctcccaaggtcctgggattacaggcatgagccactacacccagaccaacttttagtagagataatgtctcactatgttgcacaggctggtctcaaactcttggattacaggtgtgagccaccatgcccggccacatttagattctagttggggcactgctgatcccttgttaggagaccttggacaatttcctactcctttctttgccttggtttccccatgtgggaagtgagtgactagctccaacaggtcagatccttaagctctgattccctcctgcctcccttggggctaccttgcagatgagtggatttaccttggagggcagcacctctttggcacgagactcaaagaggtgttccagtcgggccgtgtccactgagacagggtccagtgaagcccagagggtggcgcagggcccaaagcggcttgcagagactccatggcccccagccagcttcagctcacgccagaaaagttttactgtcttcctcttagtggggagggctgagctgtcaggcactgaatggggaagaggggcagccagaggtagaggtggaggtggtgggaaggggcctttgatgggtgggggaggtggaagtgggggaggggggtggtactcccgagagcaggggcagtgggggtgagggagctgggatgtctttcccagcctccacagactctacattcagcatgtcctggtcttcatcctcccctagatctgaaaagtccaggtccccaatagagagcctgggtgcacgggtagggagctcccagatgggctcagccttggggcttgctggtatcagtggctccttgggctctggtgcaaggcttcgctgggcccggagcaggacacagggggcagggctctggggtgttctggctgcaggggctgtctctggggagtcccagagttgccgggcatctaaagaaagggaaggagctgtcagtgccatgccccctgtggggcaacaaagcaacaggcaggctctgcctgctcacccacctactcacctgggtgtccacccgcctcattgggcatggccccggcaagtgtctctgcccggccctgggccagcgcaacctgcttctctgtttctgctgccgccacattctccaggaaccgggctctgagggaaggtgcttgtcactgacagcgtctgacacaccccagcccaggtgtacatgccttgctgagcccctggacaccacccccaattgcaggcacgcacagacacacagggaacagtccatgcgctgagcagaccagaaccacaccccccccaaggccagcccctcttcagtcctccacatctggggaggattactaccaacccagcattcccaggtgaaaacacagggagaggatctacttaacatctaacttgcaacctcgttcatgttcactgtcctggtttttttttggttggttttttttttagagacagggtctcactctgtcagtcacccaggctggagtacagtggtgtgatcatagctcactgcagcctcactctcctgggcttgaccctcagcctcccaagtagctgggactacagacatgtgccaccacgtccagctgattttttaatttttttgaggagacagggtctcactgtgttgttcaggctggccttgaattcctggcctcaagcagtcctcccacctcagcctcctgaagtgctgagattacaggtgtgaatgatgcacccagccaaattttaaaaaatttctttgtagagatgaggtcttactgtgttgcccaggctggtgtcttgagtctagacaaggactcttagagcaggggaaggggatagctgtcccaatgggcatatcaggctgtccctcccttggcatgtctggtagcttctgggagcctatgcccaggaaagggcctggtaaacaggccaggtgcggtggctcacgcttgtaatcccagcactttgggaggcagaggtgggtggattacttgaagtcaggagttcgagaccagcctggccaacatggtgaaaccctgtctctactaaaaatacaaaaattacccaggtatcctggtgcaggcctataatcccagctacttgggaggctgaggcaggagaattgcttgaacctgggaggcagaggttgcagtgtgctgagatcacaccactgcactccagccttggagaccgagcaagactctgtctcaaaaaaaaaaaaaacaaaaaaaaaacggatgtggtaaacagtggaccctcagtttatgctgaaataatgggtgcaatccagtgtttcttttctggcccctccagcctctgtcagctctcagtccctgcctttccctcagccttaggttacccctccacccccacaccacacaccacacagcaccctaggtcccctccctgctcgcttctgagctgaagacttggcagaatgagccccaggttgggtgtccacatccccatctctggctgctaaggtgttgctattgaagcacagggaccactgtgaccccagtgaattggttcccagtgcttagcctttgggttaccgaggaggcatatgtctgggagaggataggcctgagtcccccagctttggttgcatcaggcacgtgaaacccctgctgggggaagcaatgctgaagccctgagcacatggcaggcctggcaggccggcctctgtacttactccagcctggcctgcccaggaggggactgggggacgggtgggctctcaggggccctgggtaggggggatgagaggaagagatggtaactgtggtgtcagctccatggttgctcatacccacacagagctaggcagtgatattggggttccttcccagccgcagtgggaagtgggggaaggtatgacacgaggaaactggaagtggaggggagagactgacgtggagcaggacagggtgctggaagagacagaggcagcagaacaagggagtgacagatagtgggcgggagacatgacaagaggcaaagacaggcagaacgtcggaggagacaaggaaaccacaggaggaggagatccagtcagagccgaaccccacccgctggcagtcacttaccaacggaagcagtttggtgaagtctggaaagagagagagagaaagcacgcgtttgggcagaggaggctgagtgcccatggaggggcgcaaagcggagggacaatgggagagaggactccagggtggcctctgtctccctacttacttgtagatgctcctctcgctggaggtgtcagctgagggtgccacagagatggtaggaaaaaggttcactgaagcttggagaccggagggagggcccacagggctggaggcggggcctgtcagcagggcggggccggtggaagaggtggggcctaccggtgaggcggggcctgtggggctgaaagcaggggctgtcagtggggcggggcctgagaagctggaggcgggcctgtcagtggggtggggcctgcagggcggaaggtggggcatgtctgcagggcacgcccagtggaggaggtgggtggctgtctgttggggcgggcctgagggggttggggtcagggcctgtcagctcactgggccatgcctagtagatccaccctttcccatctacagatgctcgtacttacccaggttccggggcacgcgcggggcagcccccgccttccagagaacggcggctcctcttgccctcctcagaagaaggctttcgtcgttcccgccgcccaccagcgcctggggcttcttcgatgtctccatcctccaatttcagggcgttctagcagaggcggaccaggatgtaagaaagtggttaacgtgtatgcaggtggggtggggcgctggggactgcgcttctctcttccctctttccaatccgcctcagagcgtaaggcccggcccacctcgtagagcacaagctgcgtgcgcaggtcgacgtcagtgcccgcagtgcccaggtggcgctggaccagcgcttccatgccctgctgctccagtgcatccgtcacatcgtagaaggagtcctggtccgggagcgccgccagcgtctggagggcggggataagaaggcaaggctgaggttggtggggaggtcaggagcctgagcatcccagagctggcacccagtccttggccacaccttgttgatgagggtgaccgtgtacaccaacaactcagggtcagcgccattcttctcctccaggatggacaccagattggcccagggaggagcacctgccacacagaaagtggagcagtcatgggggaacaggtaggagagagggctctgagcggtggggggagaaagggacagtctctgaccggtggtgctggccacagagttcactgcacggatgaacagcggtgcgttgttttcggagtattctacaaacaccaacagcagcttcagggctgtcttcaccaccaagcgggactgaggagagaggtcagtacatatgagtggggcttaggccagacctgtgccagctgttgctggggaaggggaagggctgctggggctggacccagagagaatctaggcagaatgaccctggccccaggcccaggcactgaagtgccttataggcttacagaggcctcagactcactcccttccagctcactttgcagaacaggaaactgaggcccagagagaagcaacaggcaaagggtataaggctgagtggagagccacttaccaggctggcacacaatgtgtacagccactgaatagtgtcactgtgggccaccacccccagcattccatccacaaagagcatcagctggccgagcgctggggaaacagggatgggcagagtcagcgagggtcgctggagcagaggtcatgggagaggggcggggctgacctctaaggatgtagctctggtagttgtggtcggcagcagcacccacacggatcaggcagctcagcccctctgaatgcacaaattcaggcaccaggtctttgtcctcctaga

SEQ ID NO: 1713 - DNA, 3357 bp, Homo sapiens
ccggggtcccagttctaaagtccccacgcacccacccggactcagaatctcctcagacgccgagatgcgggtcacggcgccccgaaccctcctcctgctgctctggggggcagtggccctgaccgagacctgggccggtgagtgcggggtcgggagggaaatggcctctgtggggaggagagaggggaccgcaggcgggggcgcaggacccggggagccgcgccgggaggagggtcgggcgggtctcagcccctcctcgcccccaggctcccactccatgaggtatttctacaccgccatgtcccggcccggccgcggggagccccgcttcatcaccgtgggctacgtggacgacacgctgttcgtgaggttcgacagcgacgccacgagtccgaggaaggagccgcgggcgccatggatagagcaggaggggccggagtattgggaccgggagacacagatctccaagaccaacacacagacttaccgagagaacctgcgcaccgcgctccgctactacaaccagagcgaggccggtgagtgaccccggcccggggcgcaggtcacgactccccatcccccacgtacggcccgggtcgccccgagtctccgggtccgagatccgcccccgaggccgcgggacccgcccagaccctcgaccggcgagagccccaggcgcgtttacccggtttcattttcagttgaggccaaaatccccgcgggttggtcggggcggggcggggctcgggggacggggctgaccgcggggccggggccagggtctcacatcatccagaggatgtacggctgcgacgtggggccggacgggcgcctcctccgcgggtatgaccaggacgcctacgacggcaaggattacatcgccctgaacgaggacctgagctcctggaccgcggcggacaccgcggctcagatcacccagcgcaagtgggaggcggcccgtgtggcggagcagctgagagcctacctggagggcctgtgcgtggagtcgctccgcagatacctggagaacgggaaggagacgctgcagcgcgcgggtaccaggggcagtggggagccttccccatctcctataggtcgccggggatggcctcccacgagaagaggaggaaaatgggatcagcgctagaatgtcgccctcccttgaatggagaatggcatgagttttcctgagtttcctctgagggccccctcttctctctaggacaattaagggatgacgtctctgaggaaatggaggggaagacagtccctagaatactgatcaggggtcccctttgacccctgcagcagccttgggaaccgtgacttttcctctcaggccttgttctctgcctcacactcagtgtgtttggggctctgattccagcacttctgagtcactttacctccactcagatcaggagcagaagtccctgttccccgctcagagactcgaactttccaatgaataggagattatcccaggtgcctgcgtccaggctggtgtctgggttctgtgccccttccccaccccaggtgtcctgtccattctcaggctggtcacatgggtggtcctagggtgtcccatgagagatgcaaagcgcctgaattttctgactcttcccatcagaccccccaaagacacatgtgacccaccaccccatctctgaccatgaggtcaccctgaggtgctgggccctgggcttctaccctgcggagatcacactgacctggcagcgggatggcgaggaccaaactcaggacaccgagcttgtggagaccagaccagcaggagatagaaccttccagaagtgggcagctgtggtggtgccttctggagaagagcagagatacacatgccatgtacagcatgaggggctgccgaagcccctcaccctgagatggggtaaggagggggatgaggggtcatatctcttctcagggaaagcaggagcccttcagcagggtcagggcccctcatcttcccttcctttcccagagccgtcttcccagtccaccgtccccatcgtgggcattgttgctggcctggctgtcctagcagttgtggtcatcggagctgtggtcgctgctgtgatgtgtaggaggaagagctcaggtagggaaggggtgaggggtggggtctgggttttcttgtcccactgggggtttcaagccccaggtagaagtgttccctgcctcattactgggaagcagcatccacacaggggctaacgcagcctgggaccctgtgtgccagcacttactcttttgtgcagcacatgtgacaatgaaggacggatgtatcaccttggtggttgtggtgttggggtcctgattccagcattcatgagtcaggggaaggtccctgctaaggacagaccttaggagggcagttggtccaggacccacacttgctttcctcgtgtttcctgatcctgccttgggtctgtagtcatacttctggaaattccttttgggtccaagacgaggaggttcctctaagatctcatggccctgcttcctcccagtcccctcacagggcattttcttcccacaggtggaaaaggagggagctactctcaggctgcgtgtaagtgatgggggcgggagtgtggaggagctcacccaccccataattcctcctgtcccacgtctcctgcgggctctgaccaggtcctgtttttgttctactccaggcagcgacagtgcccagggctctgatgtgtctctcacagcttgaaaaggtgagattcttggggtctagagtgggtggggtggcaggtctgggggtgggtggggcagtggggaaaggcctgggtaatggagattctttgattgggatgtttcgcgtgtgtggtgggctgtttagagtgtcatcacttaccatgactaaccagaatttgttcatgactgttgttttctgtagcctgagacagctgtcttgtgagggactgagatgcaggatttcttcacgcctcccctttgtgacttcaagagcctctggcatctctttctgcaaaggcacctgaatgtgtctgcgtccctgttagcataatgtgaggaggtggagagacagcccacccccgtgtccaccgtgacccctgttcccatgctgacttgtgtttcctccccagtcatctttcctgttccagagaggtggggctggatgtctccatctctgtctcaactttatgtgcactgagctgcaacttcttacttccctactgaaaataagaatctgaatataaatttgttttctcaaatatttgctatgagaggttgatggattaattaaataagtcaattcctggaatttgagagagcaaataaagacctgagaaccttccagaatctgca

SEQ ID NO: 1714 - DNA, 3357 bp, Homo sapiens
ccgcggtcccagttctaaagtccccacgcacccacccggactcagagtctcctcagacgccgagatgctggtcatggcgccccgaaccgtcctcctgctgctctcggcggccctggccctgaccgagacctgggccggtgagtgcgggtcgggagggaaatggcctctgccgggaggagcgaggggaccgcaggcgggggcgcaggacctgaggagccgcgccgggaggagggtcgggcgggtctcagcccctcctcacccccaggctcccactccatgaggtatttctacacctccgtgtcccggcccggccgcggggagccccgcttcatctcagtgggctacgtggacgacacccagttcgtgaggttcgacagcgacgccgcgagtccgagagaggagccgcgggcgccgtggatagagcaggaggggccggagtattgggaccggaacacacagatctacaaggcccaggcacagactgaccgagagagcctgcggaacctgcgcggctactacaaccagagcgaggccggtgagtgaccccggcccggggcgcaggtcacgactccccatcccccacgtacggcccgggtcgccccgagtctccgggtccgagatccgcctccctgaggccgcgggacccgcccagaccctcgaccggcgagagccccaggcgcgtttacccggtttcattttcagttgaggccaaaatccccgcgggttggtcggggcggggcggggctcgggggactgggctgaccgcggggccggggccagggtctcacaccctccagagcatgtacggctgcgacgtggggccggacgggcgcctcctccgcgggcatgaccagtacgcctacgacggcaaggattacatcgccctgaacgaggacctgcgctcctggaccgccgcggacacggcggctcagatcacccagcgcaagtgggaggcggcccgtgaggcggagcagcggagagcctacctggagggcgagtgcgtggagtggctccgcagatacctggagaacgggaaggacaagctggagcgcgctggtaccaggggcagtggggagccttccccatctcctataggtcgccggggatggcctcccacgagaagaggaggaaaatgggatcagcgctagaatgtcgccctccgttgaatggagaatggcatgagttttcctgagtttcctctgagggccccctcttctctctagacaattaaggaatgacgtctctgaggaaatggaggggaagacagtccctagaatactgatcaggggtcccctttgacccctgcagcagccttgggaaccgtgacttttcctctcaggccttgttctctgcctcacactcagtgtgtttggggctctgattccagcacttctgagtcactttacctccactcagatcaggagcagaagtccctgttccccgctcagagactcgaactttccaatgaataggagattatcccaggtgcctgcgtccaggctggtgtctgggttctgtgccccttccccaccccaggtgtcctgtccattctcaggctggtcacatgggtggtcctagggtgtcccatgaaagatgcaaagcgcctgaattttctgactcttcccatcagaccccccaaagacacacgtgacccaccaccccatctctgaccatgaggccaccctgaggtgctgggccctgggtttctaccctgcggagatcacactgacctggcagcgggatggcgaggaccaaactcaggacactgagcttgtggagaccagaccagcaggagatagaaccttccagaagtgggcagctgtggtggtgccttctggagaagagcagagatacacatgccatgtacagcatgaggggctgccgaagcccctcaccctgagatggggtaaggagggggatgaggggtcatatctcttctcagggaaagcaggagcccttcagcagggtcagggcccctcatcttcccctcctttcccagagccgtcttcccagtccaccgtccccatcgtgggcattgttgctggcctggctgtcctagcagttgtggtcatcggagctgtggtcgctgctgtgatgtgtaggaggaagagttcaggtagggaaggggtgaggggtggggtctgggttttcttgtcccactgggggtttcaagccccaggtagaagtgttccctgcctcattactgggaagcagcatgcacacaggggctaacgcagcctgggaccctgtgtgccagcacttactcttttgtgcagcacatgtgacaatgaaggatggatgtatcaccttgatggttgtggtgttggggtcctgattccagcattcatgagtcaggggaaggtccctgctaaggacagaccttaggagggcagttggtccaggacccacacttgctttcctcgtgtttcctgatcctgccctgggtctgtagtcatacttctggaaattccttttgggtccaagactaggaggttcctctaagatctcatggccctgcttcctcccagtgccctcacaggacattttcttcccacaggtggaaaaggagggagctactctcaggctgcgtgtaagtggtgggggtgggagtgtggaggagctcacccaccccataattcctcctgtcccacgtctcctgcgggctctgaccaggtcctgtttttgttctactccaggcagcgacagtgcccagggctctgatgtgtctctcacagcttgaaaaggtgagattcttggggtctagagtgggtggggtggcgggtctgggggtgggtggggcagaggggaaaggcctgggtaatggggattctttgattgggatgtttcgcgtgtgtggtgggctgtttagagtgtcatcgcttaccatgactaaccagaatttgttcatgactgttgttttctgtagcctgagacagctgtcttgtgagggactgagatgcaggatttcttcacgcctcccctttgtgacttcaagagcctctggcatctctttctgcaaaggcacctgaatgtgtctgcgtccctgttagcataatgtgaggaggtggagagacagcccacccttgtgtccactgtgacccctgttcccatgctgacctgtgtttcctccccagtcatctttcttgttccagagaggtggggctggatgtctccatctctgtctcaactttacgtgcactgagctgcaacttcttacttccctactgaaaataagaatctgaatataaatttgttttctcaaatatttgctatgagaggttgatggattaattaaataagtcaattcctggaatttgagagagcaaataaagacctgagaaccttccagaatctgca

SEQ ID NO: 1715 - DNA, 984 bp, Homo sapiens
cctctctgcccccatttccactcctgctcttgggacacaggagactggttagatgagagtagaaagtttatttttgaacacccaggtgtggggtggctgggcgagaccatctgatggctttgggagccaggccgcagggtttagcttggatctgttgagtaggagacccttaaacatggccaccctgagctaagagctggtcttggattttgctttcttttggattaaccgagtattttgtgggattccatttgatcccttaactggctgaccagctataactcctggttatgttgttttagtgttgctccaggtgtcgttggaggagaagttgaaggtacaaggagtttgcaggagggaaggtggcagttaatgagccttcctggtgggaccggatggtgagggcaggggcatctggcccagcgtggactcgggccatagatgggaagtggtcatttggaggtcaccatctctctgacaccctgaccatagcacctgcacccctgtgctgagctgcaggtccccggcaccagcgtctgtgcagctcaggtgttgctgagccgtggcctccgcagctctccatcaggatttctcaagcttcattatgaattatctctgtgtgagctcacaacggtgactgcagagtcccaggtcatctctcagatcttctgaatcaaacatatggtctgcagttgccgcgcatgtctttggccgattttctgacaatcaaagtgaagaagttctgagctacgggaagttgggttgaaggcatgatggggaaaacatgattagttgacagcttttcccagagagtttttagacaaactcaaccttggtaaccttctcagtgggcttatgataagaaccttcaatgtgccaaaaaataaaaaaagcagcactccaggtagttaatctttgtttaaaaaacccttccccccacccagtcctgcaaacaaacaaacaaacaaaaaaaggagaaaaaaa

SEQ ID NO: 1716 - DNA, 984 bp, Homo sapiens; identical to SEQ ID NO: 1715

SEQ ID NO: 1717 - DNA, 9545 bp, Homo sapiens
aggtagaagagagaccagaaaaagattttactgagaaggtaaggaatcgttcataaacctagagggtcccaaaagttgtggatgaaattgataagaaaatatgttgcttggttttttttaataaggatgttccccagcgagggaactggactagaaagcggcccacctaacctggtatcaccttcccggaggtaggccaccgggagtcctgtccggtgtgcgttagatcctgtagagcagggaggcgtttataatgggccccaccatggagtttagggttaatccagctaatcgcagagcatccaggaggtgcctggaaatgatcccctccttacagtttactataagcccatgaagagtttccaatttggaaatggaattaaagtaacagtcctgtgatgttagatttatatgcagttttggttttgtctgaaatcgcatctgtgttagtccgttctcacactgccataaagaacttccctgagactgggtaatttacaaagaaaagagctttaattgactcacagttccgcatggctggggagacctcaggaaacttacaatcatggtgaaaagggaagcaggcaccttcttcacaaggcgacaggagagagaacatgtgaaggaggaactgtcaaacacaaagccatcagatctcctgggagcccactcactatcacgagaacagcatgggggaaactgcccccgtgatccagtctcctcccaccagggccgtccctcatcttgtggggattatggggattacaattccagatgagatttgggtggggacacagagctaaaccatatcagcatgtgatcctctcaacgttccaggggtctcgtaacatgccgggcctgtctgcagccacgctggcctctctgggtgggacttcctctcggagaggcagcggagacacctccatctccatcgacaccgaggcatccatcagggaaatcaaggtgagatgctctcttcttactgacaacttgagagaaccttttgtaaaaatcagtctttagattaaaaaaaaaaaagttaattcataaagttctggatctttcttcttggtcctctctccctcacctcccctaaaatacggtgttctcctaacatcaagacccagctcagatagtgtctcctgcaggaatctgatcctacccactgaccccccagcagggcggaccgtgtgccggccccctgcgcccctcagcacccggggaataccttagtgagagcacttggcacgttgtgttgatgcacttggtcgtctctgtatgcttggtctgcatagacattcagtccacaagtttggacaccagacggctttacctactttcacacaacccctccccactaagtatgttccccttcggcctagaacttgccctttcctttctctttgtaatgtgcctttagtagccctcatctttgtattttaatgattttttttatcccactgtagtgtaggtattattctctgctctatcctcagcacccaggacagtgccaggcatttggtagtattctgtgtgtgaaagagaaacacggtgctatttgttaaagtaactagggacagtgcatctgaaaacctgaagactggaagggcaggtgaggtgactagacctgtgtcctccagggagcagaaccaagacagaagcagctggaaggagccagaactgactcagattctgaattttctagtgctttaaactaggtttaaaagggaagcaacttccactggggatgtctgagcagctggatggccgtttgccagggaggacggagagggatttaagcatccaccagagtttggccagggttaccttgaagatgcttccaacacctatgttttataagtttacaaaaccagaagagccatttcccatgtgccacccctgggccacctgcagctccttgttgcttccctttttttttcctttttcttttcttttctttctttctttttttttttttttttttttttttggagacaagagttttgcttttgtcacccatgctggagttcaatggcacgatctcggctcactgcaacctccacctcccaggttcaagtgattctccagcctcagcctcctgagtagctgggattacaggcgcccgccaccatgcccggctaacttttgtatttttagtggagacggggtttcgccatgttggccaggctggtcttgaactcctgacctcaggtgatccacccactcggcctcccaaagtgctgggattccaggcgtgagccgctgcgcctggcctgttgtttccgtttctacagcagagcagcagagttggcggcagtcctgatgtttctctgcccttaggttgcgcgtgccgttcatttgttcaggtacttactgagaggctggctggtgccagatgctgtccccggcaccaggaatttggcaaagtagagacttggagctccataaatgcagggaaaaagtgctactgatttttgcctctagcatcttactgtacattgcacagagtaggaactcctagtgcttgaatgaattactaaataggagttgaaataacctgtaccgttttccgaggctctattttgtctgttttttaaactgtgtaaaatcatatgagatacactaaaattgtataaaatcatgtaaaaatatcatatgggatacacctgaactttaatctttaaatattgaagtttattttcccttaacgcttaataaaataaaaaagaaaattgggtgctcagactacccaaatagaaactaccctgaagtataaaagatttagggaatcacctgttttcccttgacatcatctgccttttttgccatttcccccaggaactcaatgagttaaaggaccagattcaggatgtagaaggcaaatacatgcagggattgaaagagatgaaggtaccaattcacagacgtgtggtctcacgatattaacccaacttaacttaaaaaaaaaaacaacatcctaaagaagaaattcaaagtgcatgcttactgtaaataggctccagggtgtagaagaactcacaatggcaggagtgccggcatgggtgtacactcaccattttcccaaatgcattgtttgaaccaagattgaaaatgtaactgcccagtagaaaaggttactaacatactccctgatgcatgccttagacttaccatccttcccccaggcttaaaaccagtttctcatttcccataggcgtgtgccagacacttgaagaaggttcttggttttcttcactttttgtagtagttgtatacaaaaatgcttcagttgatttgcttctcaaaatatctgatgtctactaataaggccgtcctcacatgccacacttttgaaacatcccaattatttgcaccctgtaaaatgctactaattgaagtaaagactgactatggcattggctttcttggagcgtgtgcacactgcttttagagtgtgcagtgacttcattgcaccagccaggagatgtggttgccctgttccttgacagtaaggtgggcaatcagtgactgtcttccttaggcagcagcggatcatggatctggaagtgggtggcgtatctgttacttccttttcagccccctagaaagtacctgcaagatcatttgaatttaatatcaaagggcaccagacagaggaggtgacatcgatcatgactaattcactatcttcatatctgccacctttcctgaaagggggaaaaataagactctggctttcaattcatgcgaaaaggagccacttggccaggcgtggtggctcacgcctgtaattccacactttgggaggccgaggtgggtggatcaccggaggtcaggagtttgagaccagcctggccaacatggtgagaccccgtctctactaaaaatataaaaattagccaggtgtggtggtgcgcacctgtaatcccagctacttgggaggctgagtcaggagaatcacttgaacccggcaggtggaggctgcagtgagccgagatcgtgccactgcactccagcctgggtgacagagcgagacactgtttcaaaaaagaaaaaatgctgctggggagccactgaaccaaccggagacccgctggtcccacgtgaagcagctgtcctggtgtggaggtacagagctagaccagcactggtccctccagccccctggtagcctctgctgcacctgaactggcagctcttgccgctgcctttagctctgcatgtatgcgccctgaaggttctgcctctctgttttggaatcgccttcccctcctcatgtttggggacctgcaagggtgtgaggcacgtgagggcatcgccatgcgtattttacaggcctctttctctggactgtccttcaaagggaatgacctttgtctttccaggacctacccagtgagatctgcctgccattttcctatgagtcaaaaatctgaactcactactgctcctttcctggttcataagccagagtagggctggttggcagtcactggcttgtggccctatgtaattatctcagccatcacacactggctctttcacaagggctggtcacacgcctcgagtgattcttcagaaatctgttgaacagcctgacacccagccctaggacgccgtgctggggggattccccagctactgagtggggccagagactctactgcctctgtgaccacatccctttccatactggtatctcgtttgttctaatgagtgtgtccattgcttttaatagtgaattttctgagcaatgagaatttgaccaaattgaaaagggggatttccatgcatttgaaattgccatgtgtttcttcttctgatccatttgctctaagaaatatagtctaagtttaggactgagggtttttttttaacagaatactgaatgattctttgttttgatttttttattgcaatttcaaaaatatgacctgctttccacaggactctctagcagaagttgaagagaaatataagaaggctatggtttccaatgctcagctagacaatgaaaagacaaacttcatgtaccaggttgataccctaaaagatatgttgctggagcttgaagaacagctggctgaatctaggcggcagtacgaagagaaaaacaaagtaagcattagtatgatacagaatgttaacaataggctgcgtgcagtggcccatgcctgtaattctggtactttgggaggccaaggtgggaggattacttgagcccaagagttcgagaccagcctgggcaacatggcgagacatcatttctaaaaagaattaaaacaattagccaggtggtacatggctgtagtcccagctacttgggaagctgaggtgggaggatcacttgagcctggaaggttgaggctgcagtgagctgtgttgacaccactgcactccagcttgggcaacagagaagacactgtctcaaaaaaaaaaaaaaaaaaagggaatggtagggtgtgtgtgtgtgtgtgtgtatgtatgtatgtatgtgtggatatatcgtgtgtatgtatgtatatataatgtataatttacattatgtatttttatatttttaaacaatggctctccgcttatccaggaaatccaaacatctgagaataaaagtaccatactctttgccaagtgacttgaaatattgatacgtataatttcaacatgtaaactggagacagtttttctaggagaacatctaagctaaaagcaaaaccatgaaaaaacatacctatgaaagagccaccatgctcagataaggtgcgatcagatgcttcaagattttcctattcatatgtattttctgatttttattttgttctctctcaacaccatagggaaatagttatgagtatcaaagattttaagaaaattatattattttctgctgattgggaaaagacacagttactctacttaagaattaaatatatcaccaagctcagagagagagatagtcttatctgagctttcattaggaaccactggaactagtttgttaatagctgagatcagatataatttctattgagagtctcaagcatgagtcatgtgttaagataagtaatgacagcggactgattccacgaaggctgggcttggatgttctttagatagaaagcaaggaatacttttttcatacttttaggaattgtccaatttttcagagattctgagaaaaacagaaaatgtaatgtgtgagtgtcgttgttgttgttgtttttaactggctattatcctctaaatccaaagggttaaaaccaaggtacccttgacaaccttcaggcctgcttcttcgactgctatagaattgagttggaagctgaagaacattttacgcacaaagttccttatagctgaactctgcaagaggggagcttttcacaagactgatgtcatgtgggaacggaggagtggagagcacagcccagccccccttcgggtgggggcctgtaatgcatatgcattcctcctggaatgctgtcattaggcatcattcagtggactgaaaactcccgagtctcactccagagaagctggatggtgctagaatgctgtcccgagatggacacaggggccatgcaaagccccacaggagggcccttgtcatagccaggagggcaccagccacccccaagctaaaggaagtgggcgaacagaagtgccagggtgagcagaagctcaggccagatcccatctcagatcacccgcctgacaggtctagggaaggagcgtcctgcaggcctgtaagctgtcagcaaagtgagttgggtctcaggccgtcaccagggattgcgctgctgtgactgggcaggaacacagcagagccgagctgccagcttcctgggctgagcctcaggtggggaggccaggcctgaggagcagctaggttttgcaggctctccatttgctcccccaaactctcctgtttttgtctcttaaggggcagccctgaagcacagagctggccaccagctgttcatgagagatgctttagtaggccatgtttatctcctttttatcccaaagagttttccttgtcatatttcagcaggggccattttatggtaagtccttgcagggcagcctcacccaggctctcagcacagtgctgtggaagacaccaggctccctgggggggcccttcgtcggctcttgcttcactgtagataagaaatcagaaaatccttgttgattgcatcaactcctcaggttaatttgacagtaagtcatcaggcatcatctataaagtccagaggaatctgtttgtgttgtttgaaagggcttgaaggccaggtgcagtggctcatgcctgtaatcccaacactttgggaggctggggcaggtggatcgcttgaggtcaagagtttgagaccagtttggccaacatggtgaaacccgatctctaccaaaaatagaaaaattagccgggcatggaggcaggcgcctgtattcccagctacttgggaggctgaggcagcagaatcgcttgaacccaggaggcagaggttgcagtgagctgagatcgcaccactgtactccagcctggacaacagagcaagactccatctcaaaaaaatatataaataaaaaataaaataaaagaccttgaagattgtgatgatgtagtagcaggtgatttgttccacagaaactataaatcgtgagagcctgaactggcatgccagaaacatgggattccactgctttagtgctgtttttctcctttacaggaatttgaaagggaaaaacacgcccacagtatactgcaatttcagtttgctgaagtcaaggaggccctgaagcaaagagaggaaatgctcgaggtaggtagcattctcctgcttttcttttccttttttccctttggagcattttgtcaggccatgactatcttagcttaggctgcagtaataaaataccatacacagcatggcttaaacaacagaaattaattttcttacaattctggaggctgggagtccaagatcaaggttgggttcaggtgaggcctctcttcctggcctgcagacagccaccttcttgctatatccttcctccaacggtggagaaaaagcaatgtctctgatgtctcttcatataaggacactaatcctatttgatcaggaccccactcttatgacctcatttaaccttaattacttcgtaaaaaccctatctccaaatacagtcacattgggcattagggcttcaacagatgaatttagagggacacaattcattccatggcaattactaaagttttcagttttcttaaatctgagagtttaggctaactctccatccctagatttacgaaacagtccctctcattggtgaacattcctattctttggtgatcttgtatttgtttggggaggtgtggtagacagaataatggtcccccgaagttgcctacatccagatccctggaaactgtaaatatgatgccttacatggttaaagggcccctgcagttgtgatgagagaccttgagagaagggattatcctggattatttgatggaacaagcatccttctaagaggaaggcaactcaaaggcagaagtagaagatgtgacacaggaagctgaggttggagcgatgcgagagaggggccatgagccaaggaaagcagctcagtcttagaagctgaaaaaggcagggaaacagattctccctagagccttccagaaaggcttgattttagcccataagactcattttggacttctgacctctagaattgcaagagaataaatttgtgttttaagctgctgaatttatgacgattcattacaatggcaataagaaactaatacagggttggtttttaattttttgacttaatcggttctttaactgctgccttgaagtgagaatttcacccaaagcaggttttcttcctgcacttcttgaagccggaagtaggacaaggaaaaaaatcctagaatgctgacaatgagttcagggttgatgaggtgaaagagtgcttgcggcctcactcactgtcccagctctcaggttctctctcgggctggggtttttcttcctctttaaccctttatctgctttctgtctgttcctttcctcaggaaatccgacagctacagcagaaacaggcgagttctatcagggagatttctgatcttcaggaaacaatagagtggaaagacaaaaagataggggtaggattcccaagtcttgaaaatctactcaaatgggcagcctgcttagcaaatagagttttttcagagtctttagtttgcaaaaccgcttgtctgagtatgcatgcaactcccacgtgacacaaagtcgtattaatttatttaattttattaagtagtgaatacactaacttatccaaattgatatgaacttggattgtgacacggactctccatggagggtcttgtgaatgcgtagctgtgcgctctgcctgccccgtggctgggccgggccggtggttgttgaaacagctggagtgaggaggacactctgaggaggtctgatgtgtgcaagtccagacgtcttgggattatctgc

SEQ ID NO: 1718 - DNA, 7809 bp, Homo sapiens
aggtagaagagagaccagaaaaagattttactgagaaggtaaggaatcgttcataaacctagagggtcccaaaagttgtggatgaaattgataagaaaatatgttgcttggttttttttaataaggatgttccccagcgagggaactggactagaaagcggcccacctaacctggtatcaccttcccggaggtaggccaccgggagtcctgtccggtgtgcgttagatcctgtagagcagggaggcgtttataatgggccccaccatggagtttagggttaatccagctaatcgcagagcatccaggaggtgcctggaaatgatcccctccttacagtttactataagcccatgaagagtttccaatttggaaatggaattaaagtaacagtcctgtgatgttagatttatatgcagttttggttttgtctgaaatcgcatctgtgttagtccgttctcacactgccataaagaacttccctgagactgggtaatttacaaagaaaagagctttaattgactcacagttccgcatggctggggagacctcaggaaacttacaatcatggtgaaaagggaagcaggcaccttcttcacaaggcgacaggagagagaacatgtgaaggaggaactgtcaaacacaaagccatcagatctcctgggagcccactcactatcacgagaacagcatgggggaaactgcccccgtgatccagtctcctcccaccagggccgtccctcatcttgtggggattatggggattacaattccagatgagatttgggtggggacacagagctaaaccatatcagcatgtgatcctctcaacgttccaggggtctcgtaacatgccgggcctgtctgcagccacgctggcctctctgggtgggacttcctctcggagaggcagcggagacacctccatctccatcgacaccgaggcatccatcagggaaatcaaggtgagatgctctcttcttactgacaacttgagagaaccttttgtaaaaatcagtctttagattaaaaaaaaaaaagttaattcataaagttctggatctttcttcttggtcctctctccctcacctcccctaaaatacggtgttctcctaacatcaagacccagctcagatagtgtctcctgcaggaatctgatcctacccactgaccccccagcagggcggaccgtgtgccggccccctgcgcccctcagcacccggggaataccttagtgagagcacttggcacgttgtgttgatgcacttggtcgtctctgtatgcttggtctgcatagacattcagtccacaagtttggacaccagacggctttacctactttcacacaacccctccccactaagtatgttccccttcggcctagaacttgccctttcctttctctttgtaatgtgcctttagtagccctcatctttgtattttaatgattttttttatcccactgtagtgtaggtattattctctgctctatcctcagcacccaggacagtgccaggcatttggtagtattctgtgtgtgaaagagaaacacggtgctatttgttaaagtaactagggacagtgcatctgaaaacctgaagactggaagggcaggtgaggtgactagacctgtgtcctccagggagcagaaccaagacagaagcagctgaaaggagccagaactgactcagattctgaattttctagtgctttaaactaggtttaaaagggaagcaacttccactggggatgtctgagcagctggatggccgtttgccagggaggacggagagggatttaagcatccaccagagtttggccagggttaccttgaagatgcttccaacacctatgttttataagtttacaaaaccagaagagccatttcccatgtgccacccctgggccacctgcagctccttgttgcttccctttttttttcctttttcttttcttttctttctttctttttttttttttttttttttttttggagacaaaagttttgcttttgtcacccatgctggagttcaatggcacgatctcggctcactgcaacctccacctcccaggttcaagtgattctccagcctcagcctcctgagtagctgggattacaggcgcccgccaccatgcccggttaacttttgtatttttagtggagacggggtttcgccatgttggccaggctggtcttgaactcctgacctcaggtgatccacccactcggcctcccaaagtgctgggattccaggcgtgagccgctgcgcctggcctgttgtttccgtttctacagcagaacaccaaagttggcggcagtcctgatgtttctctgcccttaggttgcgcgtgccgttcatttgttcaggtacttactgagaggctggctggtgccagatgctgtccccggcaccaggaatttggcaaagtagagacttggagctccataaatgcagggaaaaagtgctactgatttttgcctctagcatcttactgtacattgcacagagtaggaactcctagtgcttgaatgaattactaaataggagttgaaataacctgtaccgttttccgaggctctattttgtctgttttttaaactgtgtaaaatcatatgagatacactaaaattgtataaaatcatgtaaaaatatcatatgggatacacctgaactttaatctttaaatattgaagtttattttcccttaacgcttaataaaataaaaaagaaaattgggtgctcagactacccaaatagaaactaccctgaagtataaaagatttagggaatcacctgttttcccttgacatcatctgccttttttgccatttcccccaggaactcaatgagttaaaggaccagattcaggatgtagaaggcaaatacatgcagggattgaaagagatgaaggtaccaattcacagacgtgtggtctcacgatattaacccaacttaacttaaaaaaaaaaacaacatcctaaagaagaaattcaaagtgcatgcttactgtaaataggctccagggtgtagaagaactcacaatggcaggagtgccggcatgggtgtacactcaccattttcccaaatgcattgtttgaaccaagattgaaaatgtaactgcccagtagaaaaggttactaacatactccctgatgcatgccttagacttaccatccttcccccaggcttaaaaccagtttctcatttcccataggcgtgtgccagacacttgaagaaggttcttggttttcttcactttttgtagtagttgtatacaaaaatgcttcagttgatttgcttctcaaaatatctgatgtctactaataaggccgtcctcacatgccacacttttgaaacatcccaattatttgcaccctgtaaaatgctactaattgaagtaaagactgactatggcattggctttcttggagcgtgtgcacactgcttttagagtgtgcagtgacttcattgcaccagccaggagatgtggttgccctgttccttgacagtaaggtgggcaatcagtgactgtcttccttaggcagcagcggatcatggatctggaagtgggtggcgtatctgttacttccttttcagccccctagaaagtacctgcaagatcatttgaatttaatatcaaagggcaccagacagaggaggtgacatcgatcatgactaattcactatcttcatatctgccacctttcctgaaagggggaaaaataagactctggctttcaattcatgcgaaaaggagccacttggccaggcgtggtggctcacgcctgtaattccacactttgggaggccgaggtgggtggatcaccggaggtcaggagtttgagaccagcctggccaacatggtgagaccccgtctctactaaaaatataaaaattagccaggtgtggtggtgcgcacctgtaatcccagctacttgggaggctgagtcaggagaatcacttgaacctggcaggtggaggctgcagtgagccgagatcgtgccactgcactccagcctgggtgacagagcgagacactgtttcaaaaaagaaaaaatgctgctggggagccactgaaccaaccggagacccgctggtcccacgtgaagcagctgtcctggtgtggaggtacagagctagaccagcactggtccctccagccccctggtagcctctgctgcacctgaactggcagctcttgccgctgcctttagctctgcatgtatgcgccctgaaggttctgcctctctgttttggaatcgccttcccctcctcatgtttggggacctgcaagggtgtgaggcacgtgagggcatcgccatgcgtattttacaggcctctttctctggactgtccttcaaagggaatgacctttgtctttccaggacctacccagtgagatctgcctgccattttcctatgagtcaaaaatctgaactcactactgctcctttcctggttcataagccagagtagggctggttggcagtcactggcttgtggccctatgtaattatctcagccatcacacactggctctttcacaagggctggtcacacgcctcgagtgattcttcagaaatctgttgaacagcctgacacccagccctaggacgccgtgctggggggattccccagctactgagtggggccagagactctactgcctctgtgaccacatccctttccatactggtatctcgtttgttctaatgagtgtgtccattgcttttaatagtgaattttctgagcaatgagaatttgaccaaattgaaaagggggatttccatgcatttgaaattgccatgtgtttcttcttctgatccatttgctctaagaaatatagtctaagtttaggactgagggtttttttttaacagaatactgaatgattctttgttttgatttttttattgcaatttcaaaaatatgacctgctttccacaggactctctagcagaagttgaagagaaatataagaaggctatggtttccaatgctcagctagacaatgaaaagacaaacttcatgtaccaggttgataccctaaaagatatgttgctggagcttgaagaacagctggctgaatctaggcggcagtacgaagagaaaaacaaagtaagcattagtatgatacagaatgttaacaataggctgcgtgcagtggcccatgcctgtaattctggtactttgggaggccaaggtgggaggattacttgagcccaagagttcgagaccagcctgggcaacatggcgagacatcatttctaaaaagaattaaaacaattagccaggtggtacatggctgtagtcccagctacttgggaagctgaggtgggaggatcacttgagcctggaaggttgaggctgcagtgagctgtgttgacaccactgcactccagcttgggcaacagagaagacactgtctcaaaaaaaaaaaaaaaaaaagggaatgctacggtgtgtgtgtgtgtgtgtgtatgtatgtatgtatgtgtggatatatcgtgtgtatgtatgtatatataatgtataatttacattatgtatttttatatttttaaacaatggctctccgcttatccaggaaatccaaactctgagaataaaagtaccatactctttgccaagtgacttgaaatattgatacgtataatttcaacatgtaaactgaagacagttttctaggagaacatctaagctaaaagcaaaaccatgaaaaaacatacctataaagagccaccatgctcagataaggtgcgatcagatgcttcaagattttcctattcatatgtattttctgatttttattttgttctctctcaacaccatagggaaatagttatgagtatcaaagattttaagaaaattatattattttctgctgattgggaaaagacacagttactctacttaagaattaaatatatcaccaagctcagagagagagatagtcttatctgagctttcattaggaaccactggaactagtttgttaatagctgagatcagatataatttctattgagagtctcaagcatgagtcatgtgttaagataagtaatgacagcggactgattccacgaaggctgggcttggatgttctttagatagaaagcaaggaatacttttttcatacttttaggaattgtccaatttttcagagattctgagaaaaacagaaaatgtaatgtgtgagtgtcgttgttgttgttgtttttaactggctattatcctctaaatccaaagggttaaaaccaaggtacccttgacaaccttcaggcctgcttcttcgactgctatagaattgagttggaagctgaagaacattttacgcacaaagttccttatagctgaactctgcaagaggggagcttttcacaagactgatgtcatgtgggaacggaggagtggagagcacagcccagccccccttcgggtgggggcctgtaatgcatatgcattcctcctggaatgctgtcattaggcatcattcagtggactgaaaactcccgagtctcactccagagaagctggatggtgctagaatgctgtcccgagatggacacaggggccatgcaaagccccacaggagggcccttgtcatagccaggagggcaccagccacccccaagctaaaggaagtgggcgaacagaagtgccagggtgagcagaagctcaggccagatcccatctcagatcacccgcctgacaggtctagggaaggagcgtcctgcaggcctgtaagctgtcagcaaagtgagttgggtctcaggccgtcaccagggattgcgctgctgtgactgggcaggaacacagcagagccgagctgccagcttcctgggctgagcctcaggtggggaggccaggcctgaggagcagctaggttttgcaggctctccatttgctcccccaaactctcctgtttttgtctcttaaggggcagccctgaagcacagagctggccaccagctgttcatgagagatgctttagtaggccatgtttatctcctttttatcccaaagagttttccttgtcatatttcagcaggggccattttatggtaagtccttgcagggcagcctcacccaggctctcagcacagtgctgtggaagacaccaggctccctgggggggcccttcgtcggctcttgcttcactgtagataagaaatcagaaaatccttgttgattgcatcaactcctcaggttaatttgacagtaagtcatcaggcatcatctataaagtccagaggaatctgtttgtgttgtttgaaagggcttgaaggccaggtgcagtggctcatgcctgtaatcccaacactttgggaggctggggcaggtggatcgcttgaggtcaagagtttgagaccagtttggccaacatggtgaaacccgatctctaccaaaaatagaaaaattagccgggcatggaggcaggcgcctgtattcccagctacttgggaggctgaggcagcagaatcgcttgaacccaggaggcagaggttgcagtgagctgagatcgcaccactgtactccagcctggacaacagagcaagactccatctcaaaaaaatatataaataaaaaataaaataaaagaccttgaagattgtgatgatgtagtagcaggtgatttgttccacagaaactataaatcgtgagagcctgaactggcatgccagaaacatgggattccactgctttagtgctgtttttctcctttacaggaatttgaaagggaaaaacacgcccacagtatactgcaatttcagtttgctgaagtcaaggaggccctgaagcaaagag

SEQ ID NO: 1719 - DNA, 2075 bp, Homo sapiens
agcaaactgaatcagagaaggtgagtggcaaagcccatgtagctggtggcattactagaacttagcactgtgatgcacaaaggcttaactgggtttggcagcaagggtctcatggatactctttaagatgtaggcccagatctcttagtagtgaatccctgatgttccctctcttggggctctggtttagcaaggacagcgaggatactttcctctctccctcctccttactcctctctactaaggattaaggagccacctcttcctccttaaggcctttgggagagatgggtctcctggtattagaaaggagagcagacgcctagagttctgacctcttgggcctcccctaaacaaaaagcatagccccttcactaccctagtaacaagtatgacctgttgcctgttgaggtcaggtgtacctgtgtgtctctctctgtgatgtatgtgggcttggtgtccacatcaatgtgcgtgaatactcctacccacagactgctactgtgccaatatagaggttcataagaaagataaaagagaaccagcagaaccccaggttctgcctctccttcctccctttgcccagataaaggtgtacagtgtttgtggtgaggctgctggacactgctgttttgggctttctagagagaatgcaaacatgcaaaaacagtgtggtagtgtaggcagaacaagatctagaatcagaagacctggagtcgaatctcagctccaacacccactggatgaacgtggacaagctgcttgatctctcagatcctcgatttcttcatctgtaagatggaaacaatatgtgtcttttctaaggggaaagatcaaatgacatcatgtatgtgaaaatgcttagaaatgggtgatgatgatgatgatgatactgattattagggtatctaataaagttggggaaagaacaaaatccccccctcacaccctattgcaccaccagccttctccctccctgctcaattatacccatgttatagggaaggaaatagggaagaaacttgtctaaggtcacatggatgttcgcaacaattgggatgcagaacttgatctgactcccaggccaggtttgattttgatttgcagtggcagagaggactaattttttactaggttctgagccctgtactgaactctggattgccctgtacttggtggtggtatacagttcagcagtttttagcatatacacgaatttgtgcagccataaccactatctaattctagaacatttttatcacccccaaaagaaatcatgtacccatttgcagtcacttgccattccctcttctccccagccctgggaaaccactgacctaccttatatctctatgaatttgcctaatctggacatttcatataaatgcaattgtacatgtggccttttgtttctggcttctttcacttagcatgttttcaaggttcatttgtgctgtagcatttatcagtactttgttcctttttctagctgagtaacgtgtgggtatatcacattttgtttattcatctgttgagggatgtttgggttgtttctactttttgactattgtgattagtgctgctatgaacattgatgtacagatttttgtgtagatatgttttcaattatcttggggcatcttttatttttaatgtcagttttctatttttaaaaaatctagacaggttggcaaatcatttctgtaaagagtcagtaaatattttagcctttgtggtccatgacattaggtatacagattacaatttctgaactctgccattccagtgtgagagcagccatagataatatgtaaacaaatgagcatggctatgttccaataaaacttttaaaaagcaggggacagattgggcctgtggaccatagtataccaacccttaatctaaatgacacattcacatgatacattattctaaaggcacaaaaagcaaaaattctccctcccacctctgtcttccagctacggggttaccttccttgaagcagttaatgttatgagattttgtgtctccttttagacacagttaataatgagcattaaagtggctatatacta

SEQ ID NO: 1720 - DNA, 2075 bp, Homo sapiens; identical to SEQ ID NO: 1719

SEQ ID NO: 1721 - DNA, 478 bp, Homo sapiens
actgggaacagcaggaaagggcaaggtggtgacaatctaagggaggcaaatggataataaccagcatggtagggaatcttctttgttgctgtggcactgtcgatctctgttccctgaactctagtgtcctccagactagatttaaggtgtggttccccgctaaattattctctcacctcctttcagtctttgctcaaacatccttttatcagagaggctttctgacatcctgtgcaagatagcacctctcccccatcgctgttatccttacccagtttaattccacgtagcatctgccaacgcttgacatatttgttttttgtttactttctggcctgtgacaactagaatataagctctgtgagagcatttttctcttaactgcttatcttcaagtaaacagaacagtgcctgtcctgtaggaagtgtttgatacatacagattgctcaaatgaaaaaagaagggtgcgagcaagcc

SEQ ID NO: 1722 - DNA, 1011 bp, Homo sapiens
agtccttgaggaacagaaccctaaaagagagaacacctgcctaatctgactcctccatcagaataatcttttgaactcctgagatttgcccagtcattttggggccatgtctgatgaaagcttggtgatcccttttgggtcaaaaacaagctctgactgaagagatgcaagattttctcagatgatttgtgtgtcagtcagagttccgccagagaaacacaaccagtaggatatattctatcttgtctgtcttcatatccatgtatctgtcatctacctagatttaatgcaaggaattggtttatgcagttgtaggggctggctaggcaaatccaaaatccacagggcaggccgtgtggaagggaggtctggaaactctcagacaagacctgacattgcagtccactggtggaatttctccttcttcagggaaacctcagctttcaacggagtggatcagacccaaccatattatccaggataatctcctttacataaagttaactgattgtagatgtaaattacatttacaagataccttcatagcaacacctaggtcagtttttgaataactgggtattatagcatagccaggtcaacacgtaaaattgatcaccacagtccatgtcttgttaacttggcacctgtacacatttccttaaaccatttaatctcccaataaagacaataacaaagtaaaacttctgcctatcatgacacagctaatctgtgtacaactgaaaatatgctcttttcctgggagagaattcacagtccttgactggtgttcacttttatccttgataatccagtaactttaataatattatgtaaatgtagctattttaataaattttatgttagatgacaaggggataagagagggaagaaaaaatacataaacacaaacattcataacaaaacaatgaatactcataataattatagtactaacttctgcaactgttcacatgatgtgttttataactaccggtgttacaaaattactgg

SEQ ID NO: 1723 - DNA, 478 bp, Homo sapiens; identical to SEQ ID NO: 1721

SEQ ID NO: 1724 - DNA, 1011 bp, Homo sapiens; identical to SEQ ID NO: 1722

SEQ ID NO: 1725 - DNA, 981 bp, Homo sapiens
ataacttcgatgtactggacttgcatttccacttccgccacgcgagggagaacctgcactgggacggggtgcactggaatggacgtgtgcaccgctgcctctcccagctgctgctggcccacgtggccgacgcctggggtgtggagctgccccaccgccaccccgtgggcgagtggatcaagaagaaaaaacctggcccgagagtcgaagggccgccccaggccaacagaaatcacccggccttacctctgtccccacccttaccttcccccacataccgccccctgcttgggttcccaccccagcgcttgccgctgctcccgctcctgtccccacagcctcctcctcccattctccatcaccagggaatgccccggttcccacagggtcccccagatgcctgtttttcctcagaccatactttccagtcggatcaattctattgccattcagatgtcccctcatcagcccatgcaggtttcttcgtcgaagacaattttatggttggtcctcagctgcctatgcccttcttccccacaccccgttatcagcggcctgccccagtggtacataggggttttggcaggtatcgtccccgtggcccctatacgccctggggacagcggcctcgaccttcaaagagaagggccccagccaatcctgagccaaggcctcaatagacggacctaggccttatttcctctttatgaacatggattggacagatctgacacttcctttccattgcttggcctgaacagactgaccttgttaacttaagcctggagtccatgcctcgtcttccttttgttcattgctgttaccaagaaagccaaggaagagcagcctgactcattcttcttggctgcagcctcttccccacttcctgggagtgacccagcgttattcctgcctcctcactcctattctctttgcctttgtgtaaaaataaaatggaaataaacaagttgcacagaagta

SEQ ID NO: 1726 - DNA, 981 bp, Homo sapiens; identical to SEQ ID NO: 1725

SEQ ID NO: 1727 - DNA, 984 bp, Homo sapiens
gtggcatagcgctaaccaaatccacttaggcttctgggctgcctccaggctcttggctaggcattctgctagcactctcatccctggggagggtggatcatacttggctcctccccaccaggtggaacctgagcctccaacagcagcctcaggtcattcataggtcaagccccaggcctgaactgccactagacaaggcttttggctcccttcctgccctctcgccaatctcccaggtccgggcttggtggagcctgttatgcgggcactccaggtccactccctcagggcagaggccacagcgccatccccttccccatggtctccctacccccaacctgcactgggcgctccgcccagaggtgagtccctcccagcccttctctccttctgtcctagccatccgcagagccatcctgtgcaaaggaaggagctaggctgtgcgccctgggcgtcatgatccttctgcgggcctccgaagtgcggcagctgcttcacaataagttcgtggtcatcctgggggactctgtgcatagggcagtatacaaggacctggtgcttctgctgcagaaggaccgcctgctcactcccgggcagcttagagcaaggggggagctgaacttcgaacaagatgagctggtggacggaggccagcggggccacatgcacaacggccttaactaccgtgaggtccgcgagttccgctccgaccaccatctggtacgtttttacttcctcacccgcgtgtactccgattacctccagaccatcttgaaagagctgcagtcgggcgagcacgcccccgacctggtcatcatgaattcctgcctctgggacatctccaggtatggtccgaactcctggagaagctacctggagaacctggagaacctgttccagtgcctgggccaggtgctgcccgagtcttgcctcctggtgtggaacacggccatgcctgtgggcgaggaagtcaccgggggtttt

SEQ ID NO: 1728 - DNA, 118 bp, Homo sapiens
cctcagcctcccgagtagctgggattacaggcatgcaccaccacgcctggctaattttgtatttttagtagagacgaggtttctccgtgttggtcaggctggtcttgaactcctgacc

SEQ ID NO: 1729 - DNA, 984 bp, Homo sapiens; identical to SEQ ID NO: 1727

SEQ ID NO: 1730 - DNA, 173 bp, Homo sapiens
cattagcagcttttaatccactaaaaaaacaagagtcttggagaatgggacctttatcttatctctgtgtctcaaatcttagcacaacgcctggcacttaataaatactgaatagcatttctggatgaatcaacgagtgaatgaagagatggcttataaataaatatttctga

SEQ ID NO: 1731 - DNA, 10995 bp, Homo sapiens
gcgccattccaaacatggcggctccactagggggtatgttttctgggcagccacccggtccccctcaggccccgccgggccttccgggccaagcttcgcttcttcaggcagctccaggcgctcctagaccttccagcagtactttggtggacgagttggagtcatctttcgaggtaatataagacatgggcgtctttgtccctagccttcccttttttctgaaacgtgaactgcgcgtacgcgtatctcctccagggatccgagcaactaattcacaaatggggaaactgaggcttaaagtaagtcacttgctttaggcttccccgtggcccgtattcaattcaggtctgctggcgggggcgcgtaaactcgacgtttgtggaaacgtgaacccgaagtttgcctaaaccccaaacttggaacccttccagattcccagccggtccttagtctcatccccgagcaccgtttcttgcatccctgcatgtttagtaagaggctcaagccttttcggagctgagagtttcactgctgtatcctgtatcctttccgctgggcttcacctttaaacgatcctaaagggactcttaagagcggaaattgacttaagttaccaggcgcagcttggtactaagagctgaggaaggaggaatgctggaggttagggagggagggaggcacaggtgacccaatctctcagttttgcccaaggagtttaccttgtagcaagaaaggtgaactgtatattgagggaagatagagaggtgaaaataagtgctctggtgatttccagtagtctttaaagtggaagatgagctattcctgtgtagtaataaagtaatgtacgttcaaattggagttaacttttccacattttaaatcccagttttgccgggcgcggtggctcacgcctgtaatcccagcactttgggaggccgaggctggcggatcatgaggtcaggagttcgagaccagcctgaccaacatggtgaaaccctgactctactaaaaatacaaaaattagccaggcgtggtggcgtgcgcctgtaatcccaggtactcgagaggctgaggcaggagaatcgcttgaacctgggatgcggaggttgcagtgagcggagaccgcgccattgcactccagcgtgggtgacaagagctcgactccgtctcaaaaaagtaaaataaaatataaataaataaaaatcccaactttgtgacttttgtattgtatctaatagcacagtggtaaatgaatataatttgcaagcgattattcagactgcatggacaaaatgcttttaccacacggatgtacaaagatttagaaataaatgatttgagatggagtctcactctctcgcccaggctggagtacagtggcgcaatttcggcttactgcaacctccgcctcccgggttcaagcgattttcctgcctcagcctcccgagttgctgggattacaggcacctgccaccatgctattttttttattttttagtagagacagggcttcactatcttggccaggctggtctcgaactcctgacctcgtgatccacccgcctcggcctcccaaagtgctgggattacaggcgtgagccactgcgcctagccagaaataaatgatttaaaggacagaccgtttaggaggaggaggaggagacacctttgaggtggtgctaagtggtaaaggaaggggctggtgaactttagagcagcatctagcattgtgcttgaggggagctggctctcagtcatgggcacttgctgaaagactggccctgtacaagtcttagccaaagttgactcccagcaccctgctgcttaaaaacgtacagtggctgcttgttgcccttgagataagatcaagatgtttagtgtggtctcccaggctttgcatgttgcgttctctccttcagactcgtttccttactgcagccacacaagactttcccacgtgtaccatttgttttctctttgggcttccaggccgctcctcagctcactgcatcacttcctcagtggacccttccctggccttctttttaatacttaccattaaattcggctccatgaagtcagagactacctgttttgtacccccacccctcacattgtgtaacctgtagtgctaatacagtggtagtagatagcaagtgctagatgaatatttgtcagacattgaaggaatctgtagtgtggagcctgtagtgtagttggcttgtgcacagaactccttgcctgattcacatatatgtctgtaggtgcccttgagagagaactccctctgggacttgattatccatacagagaatacagagaaaaccagtccctgccttcaggaagcttgtaataaacggcaggcagttgccttgttgtaggatcactgctctgatagaagaaacctggggtactgtgggagcacatataggtgtggacatcaaagaaggcttcccagagagcaggaaagccaaagaagcattttgacttagccaggtgaaggggagtgggagtggtgcgagctggatcctctctgctgctgggtgatcacgatctgtctagtcttgtctcacgattcaattcaaaggccacattttctttggaacttttcctgtttccttccttgtgttctgtgtggacctcaattttcacagcctccagtggcacatagcagcacctacttacctgcttctcattcctattggggtgccactccttgaggtctctgtctgctcattctagctgcttagcacatgctctttgatggaaggaatttattgagctcatgcactcttgattttggagggaacgttggagaccatctagttccatttcctccattcataggtagagaaactgaggctcagtgagggcaagttacttgctgaaagccagccgttgggtttgtggaaatgaggacaagcacttactttccaggcaaaggctctgttttagccatgcttttaaaaagctgttctctttctaggcagatgcggtggctcacgcctgtaatcccagcactttgggaggccaaggtggctggatcacttgaggtcacgagttcgagaccatcctgggcaacatggtgaaaccccatctctaactaaaaatacaaaaattagtggtctctggtggcacacgccttaatcccagctacttgggaggctgaggcaggagaatcgctgaaacccgggaggcagaggttgcattgagccaagatcgtgccactgactctagcctgggcaatagagtgagactccatctcaaaaaaaaaatatatgttctctttctaagctaccacacattttcttcttaatacagctgtccaactgtctataaaggcctgtgtatcttttttttttcttttcttttcttttttttttttttttgagacagagtctcactctgtcacccaggccagagtgcaatggcacgatgttgggtcactgcaacctccacttcctgggctcaagtggtcctcttgcctcagccttccaagtggctgggactacaggtgcgcaccactacgcctgactaatttttgtttttgtagagacagggtttcaccacgttgcccatgctggtcttgaactcctggactgaagtgatccacccatcttggcctccaaaattgttgcttacaggcgtcagccaccatgtcggaccctaaatttttttcttgagtgggtggagggcagtaaaattcttgagatgagatttcctgccaccctgtctggtaggcctcctggctcaggggagctggcccaacttttttggccagtttgtgactggttggcctattaatgggatgttttccagtagccataggtctcacaaaggaagtacatcctacccacatcccaaacccaacaagagtcaactttcgttttttttgagacagattctcgccctgtcacccaggctggagtgcagtggtgcagtcttggctcactgcaacctctgcctcccaggttcaagcaattctcctgcctcagcctcccgagtagctgggactacaggcacgtgccaccatgcccagctaattttttgtatttttattagagatggggcttcaccgtgttagttaggatggtgacttcgtggatctgccttcctagttaggatcctgacttcgtgatctgcctgcgtgggcctcccaaaagtgttgggattacaggcgtgagccaccgtgcccagccaggagtcaatgttcaaagtaatcctgagaatgggcaatctgtttttctgatttactttctctgtaaatcaagcgcgggagctgcaggcaggcagaatttttgctcgttaaagggccctcacatgtaggtaatgttctaaatttgagctcagatctgtctgcctcacaccaagtgtagtttgctgattgctgacagagctccactttcctgtgtttgaggcttcttttctaactccttttccaactgccatgctgttctctttctgtgcctccccaatctccctgcccacttcctgcagtgggcctgctttggtacatttccttagagttgcttgtgcacagagctccttggctgattcacatttgcatctgtataggtgccctttagagataactctctctgggacttgattatccatgtgataccaaccttgtcctcttaggccatccagtcagtaatatgtgttattaaacacttcccttgtgccaaggcagtgttccaggcactaggaggacagtggtgaataagacagacaaaattctcatctactagtaggggacagataataatggatgaaaataatggatatgatgtcagttaattatgtgaaaaacaataaaactgtgcttgggtgtggagcatgagcaggaggggcacagtttagaaagggtagaccggctgctgtctctgagggggagaagattgtcctgagtcctgaatgggtggtgatgtgagttgtgtaagcaccagcaagaggccacagtggggctggaagagtgtctgggcctggtgtggaataagatacagggaaggggcatgtagtaggacagagaccagatgtggtgccggctcgtttgcctggcgcttcctccatgggcctaattaattggtaaactcagtttaccagatgtttccattggcatggtgtcttgccatctcatatgcaaacacagatgctgccacctcatcagatgacttcaggagaagttatttcttcctctggagtaagatttttgatgtataaatgatatttttttctttcctatgttttgattacacaggcttgctttgcatctctggtgagtcaggactatgtcaatggcaccgatcaggaagaaattcgaaccggtaagcattccctctgtgtacacaatgttctgggcttcagcagtatttcctagttgctaattttatacttcatgtgtttcagtcctgcttttatcctaagacaacatttcagggactaaaatgtgtgcacataatctctatgagctgctgatttttggttcagtttattaattgacatatcacccataacgaatcatttataatgaacttttcgtattcgtactaggtaaagaagaagaccaatagtgtgtactgctttttaaaaaaattttattatttttggaataggtcttacagagaaaagtctcttgtgcttctttttattccccaagttctgtccctaaaggtaaccagagcttctgatttcttcgtaccatattttacatgtttttttttttttttgatggagtttcactcttgtcgcccaggctggagtgctcactgcaaccaccacctcatgggttcaggcagttctcttgtctcagcctcccgcgtagatggaactacaggcatgcactaccatactcagctaattttatatttttagtagagacggggtttcgccatgttggccaggctggtgtcgaactcctgatctctggtgatccatctgtctcagcctcccaaagtatcgggattacaggcgtgagccaccgtgcccggccttatatgtgccattttaactgtaaattatgatgctgattgctggatctctgcattgtctctttttttttttttttttttttggagacagagttcttgctctctcacccttttaagaaaggagtgcagtggcatgatctctgctcactgcaacctctgcctcctgggctgaagcagtcctcccatttcagccccccagtagctgggaccacagtgtgagccaccacatttggctaatttttgtttttttatttttttgtggagatgggatcttgctgtattgcccaggctggtcttgaactcctaggctcaagcagtcttactgcctcagcctcccaaagtgctgggattacaggcgtgagccaccacgcttggcctctgccttgtgtttttttttttttttgagacggagtctcactctgtcaccagtctggagtgcagtggcgcgatctcggctcactgcaacctctcactccctggttcaagcgatccttctgcctcagcctcttgagtagctggattacaggcatgttccaccacgcccagctaatttttgtatttttagtagagatggggtttcaccatgttggccagggtggtctcaatctcctaacctcatgattcgcccacctcggcctcccagagtgctgagattacaggcttgagccaccatgcccagctgcattgtctttttaaagaagatctcatggcttttatgctatattaatatctctctctttttttttttaacctgagaaaagcataacttatctgctgtttaatgttggttaacacatgagaagttgggggttatgattactgctgtggccaagattaaaatccctgagttgtctatgagagggctttgtttttacattctgattattcatttatgagggagataaatgagtctgttgtttttcttattttaataattttgttcctttttttttaaggtgttgatcagtgtatccagaagtttctggatattgcaagacagacagaatgttttttcttacaaaaaagattgcagttatctgtccagaaaccagagcaagttatcaaagaggtatgaactcagttttctcctcagctctataggaagaactaagtggtgccaggattccttttatgctttaaatgagatgtaaccgtttcctgcgagtttcattcaggctttataggtcagtgtgaaatgtggctagtcatccatgtttgggacaacctgaacaagaagtaaagccaaggagtggggtccgaaagcagagtgtcagacggaacagctctgatgtgacttgtgtcatacattggccttcaggaaagatttttcttaaaagattctgccatgtgaaaaaaggacaaaaagccactaacatataggcttgttttggacaaaaactgagatctgtgtccccacttgccttacccagtgccttgcacacaggaatccaaggaatcaaaaagtagtgttcgacccaggttcctggaaactcaggatttcgttgatctcagttgttctaagctagggcatttggaagtgtgttggggttgccacgatgacttgggaagctttaatggcattgaatgggttgggccaggacctgccccatgtgatgtggaagagtgaagaatcatcctgcccaaaaagccggcaatgccctcagtgagaaacactgaattgagattattggttgggggcaatttttgaagtaactagtcccaattaatcaaaaagtctcttttcattcatgataccagctgttggggatagctattcttacagtttatcatgtcagatcatttcctgatgtgaatacttgaataacagtgcaggtatgtccaagactggatggttagtaaaggatgtaatgctgttcttaaaaagctcttgaaaatgtaattttaacagttcataatctgaagtgatagatcagtggtgtggattttcttgtaaacagttgttaacaaatgtttcagattttcagtgttttaggttctcagcagtagcctttggagagaggtactggatggctggggaccaggatgggatagagtctgtaattagtctgttttcaccctgctcataaagacatatctgagactgggcagttcacaaaagaaaaaggtttgatggacttacagttccatgtggctggggaggcctcacaatcatggcagaaggtgaaagacacatctcacatggtggcagacaagagaagagagcttgtgcaaggaaactcccatttttaaaaccatcagatctcgtgagatttattcactaccaggagaacagcatgggaaagacttgcccccgtgattcaattacctctcaccaggttcctccctcgacacatgggaattgtaggagttacaattcaagatgagattgggtggggacacagccaaaccatatcaatctgatttctttttggctgcccttttgaattttgtaacttgcatattactttctataagaaaaataaacgtaggccgggtgtggtggctcacgcctgtaatcctagcactttgggaggctgaagcaggtggataacttgaggtcaggagttcgagattagcctagccaacatggcaaaaccgcatctctactaaaaatataaaaattagctgggtgtggtggcgtgtgcctgtgatcccagctactcaggaggttgaggcaggagaatcacttgaacccgggaggtggaggctgcactgagccgagaccgcaccactgcactctagcctaagtgacagcaagacttcgtctcaaaaaaaaaaaaaaaaagcccataaaaacttatgttagaatctgtcatctgggttaatcaaatagtggagccaagcagagtaatgggcttaatatggtttaatggattctctttgttttgaattgttagcctcttaactaaccagaaccgtatgtgtttttcctgcatttgctctgacttagtccatgactttcatctgcaggatgtgtcagaactaaggaatgaattacagcggaaagatgcactagtccagaagcacttgacaaagctgaggcattggcagcaggtgctggaggacatcaacgtgcagcacaaaaagcccgccgacatccctcagggctccttggcctacctggagcaggcatctgccaacatccctgcacctctgaagccaacgtgagcaaagggcagaggcagttggcctatgagtgggctgatgcgtgaggttggccacacattccttcctgtggacttgacattttggaagaactctttgccagataatgagttcattttagttttatgctcccattgaaaaattttccactatttttataagctgttaatttcttgagtactttataacatgtctgtagcttggataaaccaagtaagtattttttttttgtctttagcaaagtttagactgtgaatatgatgacacagattcttttttatggtggctttgcttgttttaaatttttgcatgacttttcatctttttatgtgtgtttcctgtagtttgatccgaaggaaaagagtatagtagcctgagaatcaggagatgggagttttagtcgtaggccttatgataattaccccgcggtggtgtgtagaaaagtatgtaaatttgctctgttttaagactttgaactacctcaagaagaggaatctaatacaatatttgtaatgtttccagagctctcagaatgaggatttttttgtaaataggtcagaagacgatggaactgtcctgggttagtatagtaatcttacagtaggatccttaggttgatgctgacttctgtttggggtatgtttatattttatgtggtgtttactttttttttttgacatagaaggatatagtgggagcagtgatacgctaacattcattacattctgcagtaatgaatctgtttaatgggtcagtcactgttttcagtagcatgacagtggggtcataggtgagctgtgaggggctaaatcttgctctgattgtctctttctgttttgagttttgtttgcgtgtatcatttttgttctacattttgggaggggaaacattttccgttaaggaaggttgttgccagtggatttgactccaagggactagagtgtcgtggtgggggtggggaggggctgcagggtgatcattggctactgagcctccacagagagcatgtggtgccctgcctttgggagggtattttgctctcgttagttttgtgggcagcctcagattccctgttgagttgctgttaagaaatggagatttctggctctcattgggtaaggttttctgagttttatatcttattagatcacatccctttacccagaacaaatgcttcactgtcttctgattggcagtactcctgtggctttgtgccttgactcattttgttgtcttcagccttgaaggccccttcccacatggactgacatccactcatgtgcctgatccctgaagcctcccagcacccattcagttgcatccccagggcacaggactttgatctcttctgttgccctcgctaggttctccctggtgggttagtgctttgtatctgtctctctgcccctcactaattctacacccatgagaattagacattattctccttaaatatataaggaccatataatctgtatctttttggtgtgtgtatatggtatctggcacatggatctctgattaccagcctgacatcaacaaatcccctcagttacaacgtataggttaaacaaagcttttaaaagctcatgtggtatgacctcaaggttgctaacctggtcactcatggtaattagaaactctgattggcagctttgtatttcttgactaaaaacctaaataaactgattaggttttaggcgttctttcaaagaggttcttgagaagattgagaactatcctatttggtgcttagtgaaaagattttgaattactgtacgtaccagttgttgccatttctttattaaattcagaagtttttttgccaaataacaatttt

SEQ ID NO: 1732 - DNA, 1986 bp, Homo sapiens
ctcaaaaaagaaaaaggagatgttgaatgggaagtcagcaagggtgctagaatgtagcaagtattcttcaggtgttagtgatttctgttgttcgggaagaggagggttatggaggaagagtatgggatttaggtgggttaagtgatttgcccaaagtcaagaggttagtctttaacctttggcagaagcaggatttgaagtgagttttcacacccctcttccctggtcagtgtgttgataacagcccacccacctgtggttccagggtgttcttaagaagccaaggttgtcttgggtgtggtagctctttgaaaggtagaaagttccaccaagaaggccttttttcttgaatactgcttagcttccttgtcaggctccaagatgcagattgcctgtgggctatctctctccacagataaacctactcacatcttcaggacagccttttttttttgagacaggagtcttgctctgttgcccaggctgtagtgcagtggcacaacggggtcccacaggcaagtgctggggaaaggcccacccagccatcaggtagcctgtgtgttctacaaacagcagctggcagcactgtctcctgccggacattcctgccacccgacatcaaagctggtgggtgaccttttcagccatttgacattcctcccagaagaacctctgcctcccagaggtttaagcagttctcctgcctcagcctcccaagtagctgggctatttttttttttttttttttgagatggagtcttgctctgtcgcccggttagagtgcagtggtgcaatctcggctcactgcaacctctgcctcccgggttcaagtaattttcctacgtcagcctcccgagtagctgtcaggtgcacaccactacacccagataattttgtatttttagtagagatggggtttcaccatgttggtcaggatggtctcaatctgacctcgtgatccgcctgcctctgcctcccaaagggctgggattacaggcatgagccaccgcgcccagccttaatttttgtatttttaatggagatggggttttgccatgttggccaggctggtcttgaactcctgacctcaagtgatctgtccgcctcagcctcccaaagtactgagattacaggcatgagccaccgtgcccagcccatcttcatcttctttacttgaacttaattctttttcatgcatcttcccttctttcctcttttctcctccacccaaatgtcttaactgttaacattcccaggtgtttggtcctgggcctctggaggttgtgaaggagcactgctcagtcctcccttcaagaaagcagcttcaaggagttcaattacaaaagctcctggcattggggacctgccgccatgttcctgcccagggcatgctggtcctggctgtcaccaagcacagtggaggtcaggtgctaggccatttctgcccgacacaggcctcctctaatgagcagtctgaggccaggcacaggaggctgaggcaggagaatcgcttgaacccaggaggtggacgttgcagtgagccgagatcgagccactgcactccagcctgggtgacagagtaagacttcgtctcaaaaaataaaaaataaaaaaatactgagcagtctgcttgggcgcttccatcagcctggccatgacatctttggagctgtcctgccctcttttgccccggtgttccttggcccacctgtcagacctacatcataggctcttcctgtcttctgtttcctctcccctttctctaacataggtgtttctcctgagaaagaaaaaaaccacctgtccctgacattcagaagctgacaacactgttcggtcatgccattctcctgttggacataaacagtctctgaatgccaaccccaaagttgctctcaggccatgataaaataaaccacttaataattttgtctaagcacgtacaaagaaaattcaaggtcagtttaccactcacaaaataccaaa

SEQ ID NO: 1733 - DNA, 593 bp, Homo sapiens
ggctgaagtagggggattgtttgagcccgggaggtcgagccctgatcatgacactgcactccggccagggcgacagaacgagaccctgagaaaaaagaaaagaaagaaaaaaaaagattagcatagtgactttctctttgatgtaaccataaatatttaaagacatcagtgccgggcacattgggaacctcaacaaagttgtttccgttatccatctccgaccagaattcaggaagaactttgcctgtcttgttcccgctataaccaatgactcaacaaatgtttgtggagtgagtgggtgaccctctccttttaccaacggtaaacagcccgcggaaagaaaaagtgacttagccaaagtctctccaggcatttggggcagagtcgggactagcatagtagtatcctgactctcgcaggagggctcgctccactgtagttattaattctcctctccacacaaccaggtctaatccggccaaagtcttcaattcttaagctaagaaaaaaggaaaatacatgtaaactctgttttgcgatagacaagaaaacagaagaattaaaaatcctccttccggggtgcaccagaatcc

SEQ ID NO: 1734 - DNA, 5033 bp, Homo sapiens
cgcagaaccaggaaagtaacggctacagacagtgagaaatagtttcgctcgccggctagaaaaactctgtcggtaccaaccccagagcgttgagagcagcccacctccacgcttccttaacggagaggtgcaggactcagacttcaccagcccactcggtcccagccttgtacgcaaagagacgccaaggacgcgctctcccgcgtccaggcagccccagcttgctggcttgcctgcccgcctgcgtgcagcactcggccggcgtgcagcatgaccctgtggaacggcgtactgcctttttacccccagccccggcatgccgcaggcttcagcgttccactgctcatcgttattctagtgtttttggctctagcagcaagcttcctgctcatcttgccggggatccgtggccactcggtaagggtgtcctcatagtgcaggtagagtgggggaaggctcatgggcagattgtctcctgagggacccaggacaggtaagactgtacaagagcctccatgaatagtcgaattgaggctcaggtggagtgaagtcaggagtctggtgcagcaagcacccctttccaaggatagggagagctccccatccaggatatcctggagaaggaccccagctgggtccttgggaaggctgctgcagagaatgggcacccagtccagtaatcctgaggaacagtataggcttcttgtgctggagggcctcccacctctcccaggactaaagctgcactctcatcccatccggtgggtgatgaccttcaggccaaaaggacagatgccagcagctcagactgcagtgttcccctttgcactgggttgagacacatgtgtatgggtgcctcatcctcaggactgagactcccacattggattagaagttggagccaactgggtgcattgtcttagactttccccctctcccagaacctaggttgtgcatttttcagttctgggaggacccagcttttctgcatcttaatctgtgttgctttccctggaactggtgcacctaggagtatctgcattcccacctcctcccctcggagatcaggctggggcctccctcttctgagggaggtgacccctgcgtgcctagcacttctggactcactgagcctcaccaagcagtgactggaccaggaggcagaaccaggaccaggcgccagacagctaggggagtgaaggtggtggaagagtgccaggaagtgggggtggaggggaggtgctgttagggtagatgggaaatggggctagggaggtgaaagtgcgtggtcacaaaatatcagaaatgccagtagcccagagggacttgcaggaaaagcgtgcctaacattagtctcaaaagtctggatataactaaagatccaggtgaagtggggtcaagggtggtcttggggactctggtttggcagggctcaggcctgacccgggtgcctattcctgcagcgctggttttggttggtgagagttcttctcagtctgttcataggcgcagaaattgtgggtgagtgtgtggtgcagcccatggggagaggacggggtgaggaaggaggtgggcagagggcacctgggacaatagggaactggggttggttttctgctccctcttcccactctccagctccttctagggcccactttttggcccttaccatgcaaccacattggacctctaagtccccatctctctgcagtgtcccacctcccataccactctctaattccattttcccaccctcatcccacccccaccgtgtgcctttccctacagctgtgcacttcagtgcagaatggttcgtgggtacagtgaacaccaacacatcctacaaagccttcagcgcagcgcgcgttacagcccgtgtccgtctgctcgtgggcctggagggcattaatattacactcacaggtgagggggctggggctaaatgaactcctggagctgggagatccccggttaggtgagtgtgtcagggatagctggagggcctctcacatcccacaagctcaaatagcttgtggtcctcgtggatttgcgttttctccaaccaccaccgaacccatttctcccgccgagagcgccacacccccactttcctgtctgaatccgcttagttgcgaggtctccgaccgcgggcagccccatgagcccgcctcaccccacagggaccccagtgcatcagctgaacgagaccattgactacaacgagcagttcacctggcgtctgaaagagaattacgccgcggagtacgcgaacgcactggagaaggggctgccggacccagtgctctacctggcggagaagttcacaccgagtagcccttgcggcctgtaccaccagtaccacctggcgggacactacgcctcggccacgctatggtaagtgctggagggaaggctgtgtgcacgtgtgtgtgtgccaggagctgggccgtatgagcgggaggatgcaggcctcggaggcgctgagcagctgcagccagacccgacgcgctcggggtgggcatgacagcctcgcgggttagaagatccacgagatctgcacagacggaatccggagagactccagccaccgcctggacctcaggagcccgcttctcccccggggaattcccctgcaccgctgccatcccagtccctggctttgacgctggggtagggataaagaagagcgcagctgtgggaaccccggtgggctgggagaagcccgctcacagcgggtccccccactccccggcagggtggcgttctgcttctggctcctctccaacgtgctgctctccacgccggccccgctctacggaggcctggcactgctgaccaccggagccttcgcgctcttcggggtcttcgccttggcctccatctctagcgtgccgctctgcccgctccgcctaggctcctccgcgctcaccactcagtacggcgccgccttctgggtcacgctggcaaccggtgaggaccgagagaatgggccccgggggctaagggtggagacaggattcacaccgggtgtgcactttccagtttacagaatgaattcacatctattaccctatttgcccctctcaatagttcgcagaaacaggcactgttatgaccattttacagatgaaaagtggggggctcagaagggtttggtgtcttgccgtgtttcatgtaattcagattagaggtgtgtggcgggaggtaacacaaggggtaggctccaaaagatggaagaaggcccgggcatcacgcctgtaatcccagcactttgggaggtcgaggcaggaaggtcgtttgaggccagagttcgagaccagcctgggcaacatagccctgactccacatgccctcctttctttcgatccccaccgccacaggcgtcctgtgcctcttcctcggaggggccgtggtgagtctccagtatgttcggcccagcgctcttcgcacccttctggaccaaagcgccaaggactgcagccaggagagagggggctcacctcttatcctcggcgacccactgcacaagcaggccgctctcccagacttaaaatgtatcaccactaacctgtgagggggacccaatctggactccttccccgccttgggacatcgcaggccgggaagcagtgcccgccaggcctgggccaggagagctccaggaagggcactgagcgctgctggcgcgaggcctcggacatccgcaggcaccagggaaagtctcctggggcgatctgtaaataaacctttttttcttttgttttttaaaaactgtttttcccattaattttcatggcttctccgcgccggggtcgcacgtcctcatgagcttcgctgggctggagacagcctagtacactctccgcagtgctgtgaaacctgattctctgcgtcgactccagagtaataggggcgccctctagtgaggccggagggaccctaccagagctagcatctttctgaaccaccccagggggacgttaggtggcagtgatgaggcaggtcacccactcccccgtcctggatgccactcagctagcccagctgagtggggtgggaaggaatagcgttttggagttgattccctaacttcccacctggcttcttgtgaggtggtgtttgagggccaaggtaggtgtcagcaaggcatagaaagataaatcccaagattcttggcaagtcttgcaatcttatgtagcaaatttgggaactgaagctcaaagagaatgtggcatagttggttaatgttagacctaggatgagaagtttggtttcccctcctttccagtgctgtctttcattgtaccaaaaggccacacaagctggagaagtaaaggaagaacaaaaggaacccaggaaaaaggaaaacaagaggtgccgagggatgagaggaaaccataggagaatcatatgtaacccccaccctgctggtgttatgggggtgaagttaggtttcagtgaatagcatcttgaagaggcaaggcagcacggaaaggctgggttgctgtgcagataagctagcccctgcttggccttatcatggcaacaggctttatggacaggcccagcatctcttcagtcccttagggctttttgttttgttttgttttttaacatcagtatatagagcctcctttttctactccgtctgtagattggtgctgggtgtctggtaacagccaccctgagggcagttctgctggttttatggggcgccaatgaggtttggagccagactggaagtccaggtggcctccacggggaggaatgttataaagcacaatcaggatctttggggtgtgcctccttacagtatgccttggtggaggaagcctctgacaggggaatgtcctgggacttgggactgtcagccatggaccggtagcgggggctcaggagtccaccttcctcaggactccactccagcatggggtcttcatccacactctggttgaagaaagccttcagcctgtgaggctgcatcctgtgggccaccgccatagccaggcccagcagcacacacagcagtcctg

SEQ ID NO: 1735 - DNA, 134 bp, Homo sapiens
cccgacctgcagcccaatatcagcgctgatccactcagaactgaaggccttgtatgatgtgttggtgctgacctggcccacagaccactcagaactgaaattcacagctgtggttggggagttggacatatggg

SEQ ID NO: 1736 - DNA, 5533 bp, Homo sapiens
ctacacagaagacccaaggctgcgatgctggatacctcaatttgggagctggagactggatatgcaggattgagttatttgagctgagaacccaagaagggctggcaatagctgaaggcttgagtgtgtgttaaatctgagaagtggaaccttgacctctctcatcacaatggttcacctcccgagccaccccaacacacatacccctttccttacctgctttccacttccctcaggctgagctccaagtggcacaacaggagaaccatcacttaaatttggacctgaaggaggcgaagagctggcaagaggagcagagtgctcaggctcagcgactgaaagacaaggtggcccagatgaaggacaccctaggccaggcccagcagcgggtggtgagtgaggccccttggcaacaggaaacgggaaattccaagggcaagttgtagagaagcctgcgtgtctaaagagaaggggagagacatggctaaagactaaacaacacaaccccgagtcctaatgcagtggagtggagggagcgtttacctccctggctgatgaatgattcactaggaactctgatctccatctcctcctttctcctgaggccgagctggagcccttgaaggagcagcttcgaggggccaggagcttgcagcctcaagccagcagaaagccacccttcttggggaggagttggccagtgcagcagcagccagggaccgcaccatagccgaactacaccgcagccgcctggaagtggctgaagttaacggcaggctggctgagctcggtttgcacttgaaggaagaaaaatgccaatggagcaaggagcgggcagggctgctgcagagtgtggaggtagagggatggggggtacctggcaatctgatggccactgcccccacctctgtggggactcctacatgtggtcagaccctctgggaggagagaagaggggttgagaaccttagaggacttgggtggagaggggctttgagggaggtacactttactttctaggcatgacccatccctaaccggggtatcccaatcctgatcaccagagtaccttccttggaacagaaacattttctgtcctagaccccaggccctgccataatgcccattcctgatcaagcagcacctgccgtcatgtcctgtccttcattcagagggtataggaaatgaaggcaaaaaggggaaagtgctctaaaaatgatgctttaaataaaggaaaggacacagtaagggatggtgctgttgacagtggcgttcctttttcttccccctccaccctcccattttccttcttggctatctctcaggcagagaaggacaagatcctgaagctgagtgcagagatacttcgattggagaaggcagttcaggaggagaggacccaaaaccaagtgttcaagactgagctggcccgggagaaggattctagcctggtgaggcatccagccaccaagggtcctgtcctatggcctcctgaggcatccataccccttctctctgtcttgggtatgggctcagaagtgctaggtgtccactaccatgttgggtggcatttcacttgcacacgcaagccctcattggtttgaaatgtgcatttttttctgctctcagggcacacatctgggcccagtagaggtgacttaggagaattatagagtggccccttggtatgaccaaggcctctgcaccccagcctagaggaagtcatgcaggtccccactcgagaggcagagactaagacttagaaaactgagtatctgtggcccaagacaaagtactcatggaggaagtgttgggaattcctgtgtgtgtgtgtcagagcagggaagaagcagaggcatggggagacctggttctagattgttggtcctggtcccagagtccaggttcttggaggtacattctaggctccagattccattgggccctcttccctcaggtacagttgtcagaaagtaagcgggagctgacagagctgcggtcagccctgcgtgtgctccagaaggaaaaggagcagttacaggaggagaaacaggtgagcacccataacccaggccccgtggatgccacaggtgaggacttgagggctagaaactttgtaaattcctgtcatctcttggcttagaaactgttctctccaagagggcccgtaccctggcttctcttattagctgatttggcaggacagcggatgatctctgggagaagggagggatgtaagtggtgaagcaggggtgctggggggagtgtctgcctgaagttgccccaatctttgctgaaggcatctaatgctgaggagctaagagttcttcttgggtgcagcttctgcaggctagcaaggttggcaccttcccattctctagcacctgcctttttccttcccaattccaggaattgctagagtacatgagaaagctagaggcccgcctggagaaggtggcagatgagaagtggaatgaggatgccaccacagaggatgaggaggccgctgtggggctgagtccgtgtagccccaatcttgtaacacctcttccccactctacctcccgctgttgaggaaggctccatgtaaccttgctgggagctgcctttgccttctatgtgttttgccttttctttccagcacctggcccctgtatagtctaatgataccctcatccagaggagacagctggtccaactcctcacaacacatccttttttcttctctgcctgcttcatctcctacaggctgcccggcagctctgacagactcagaggacgagtccccagaagacatgaggctcccaccctatggcctttgtgagcgtggagacccaggctcctctcctgctgggcctcgagaggcttctccccttagttgtcatcagccagccggctcccatttctcctcacctctctgggccagctgaggacagtagctctgactcggtgagcagtggaggagcctgtgcagaagcagtaaggaggggcagggccaaacccaagtgtcccagcctggagtgcagcacgatcttggctcactgcagcctctgcctcctgggctgaagcgatcctcccacctcagtctcccaagagtagctgggaccacaggcaggcacccccggctaattagagaaggaatcttagctatccagggctctctttttcccaggggagaggaggcaggcccagcctctcttcagtgccacaccagtagatatcatcccaaaacccagaccagcccaatagcctcactgcttctcccccacagtcattctcttattattcaccagcccctcaaaacgcctctcctgcctcactcttcctaagcccctcaggtcactgtcctagccttggctgctcttcccatacctgtcccaatgtgctgctcccccatcttgggacaccaccccaaagcccaaccctgtctctttggcatccaggaggctgaagatgagaagtcagtcctgatggcagctgtgcagagtgggggtgaggaggccaacttactgcttcctgaactgggcagtgccttctatgacatggccaggtgagttcaaccagcaaggccaggagggaggtgggaggaggtcagagggaaagggcatctgtgtggacagtcaccaggccctgctcccaacccctgcccttcttggcctcagccaagaaaaggagatacaggtatggttaacaaggaaaatgactcactgctccaaatcccagatgccttcaggtaatccctacccctatcttatcaatgcactcagaggtcctgcctttaactggcttctatgttgttctagcaccatcttctgcagagcccaaattgccctgcttcccctctctcctgcctctaccccttccccaaccaccaggtaggtacctagggtcctccggggaggaagggaggtgaccatggcccccagggataggagcagagagaagactgggatccagcatccatctggctacaactgaaatgctttccctcttccctgacttccctgggtaacccttagggaagggaacctatagaggtgggggtttcaggtatcagattgtccccttctgccttcccttttattcccaggttcaagggggcaggcacagggaagagagatttgatcatctagtcccggttttgcctggatgtgagatgggctcagggcagggagggggtgatgctgtcatccttctcggctggagcaggaagatgaaggacgatgtcagactcattttcagcctcattaggcagcagacggagatggagggaggagagcaggaggctgggggatgggctctgcactgcagagaccagcagggactaaagaagagaggacatggggaactggaaaaataagccttccaggattgtggggagaaagacgctgtgggagaggccaggatgctgcattaggcacaggataacctgggaacccaggcacatgggtcctgctctccgaagtctgcaagtcaagaagggaacagagcacgccgaccctctccctttcccctctgtctctcttagtggctttacagtgggtaccctgtcagaaaccagcactgggggccctgccacccccacatggaaggagtgtcctatctgtaaggagcgctttcctgctgagagtgacaaggatgccctggaggaccacatggatggacacttctttttcagcacccaggaccccttcacctttgagtgatcttactccctcgtacatgcacaaatacacactcatgcacacacacactcacacacatgcatacacttaggtttcatgcccattttctatcacactgggctccatgatattctgttccctaagaactgcttctgtgtgccctgttttcatcccaagatttctcacttcatcctctcctacctggctcttttgtcccagggaggggtcctgttcggaagcagtggctgaatttatcccctgaaagtggttttggaggaaccgggatggaggaggccttcccctgtgggaatagaatcgtccactcctagccctggttgcttctgatacacagccactgcacacacacactcacactcacactcccttgtctgatgccccaaagccaattcctggggcaccctaccctctcttatttggagtttccgttggtttacctgagttttctctggggtctgcacagaggcagcagcatggacatcatggcctctcaggtcccttttggttctcagtttcattggttcctctttctgttcccccattgacttctgtgccccaccctagccttttccataaccttaggtattcagtttggaggggttttttgtatttttgaggattcctgtattctgtatcctctcctcgcatctcctcacatggaaagaaataatgtatttgtgccttctgtgaggaatgggggaacaagtgtcccaggtatccccatttccaaggcccccctccctctccaggtccccccacagcaataaaagcttccccctgatatccatccctttgtagtttgaacaaatatatttatatgatatgtatga

SEQ ID NO: 1737 - DNA, 5543 bp, Homo sapiens
ctacacagaagacccaaggctgcgatgctggatacctcaatttgggagctggagactggatatgcaggattgagttatttgagctgagaacccaagaagggctggcaatagctgaaggcttgagtgtgtgttaaatctgagaagtggaaccttgacctctctcatcacaatggttcacctcccgagccaccccaacacacatacccctttccttacctgctttccacttccctcaggctgagctccaagtggcacaacaggagaaccatcacttaaatttggacctgaaggaggcgaagagctggcaagaggagcagagtgctcagggctcagcgactgaaagacaaggtggcccagatgaaggacaccctaggccaggcccagcagcgggtggtgagtgaggccccttggcaacaggaaacgggaaattccaagggcaagttgtagagaagcctgcgtgtctaaagagaaggggagagacatggctaaagactaaacaacacaaccccgagtcctaatgcagtggagtggagggagcgtttacctccctggctgatgaatgattcactaggaactctgatctccatctcctcctttctcctgaggccgagctggagcccttgaaggagcagcttcgaggggcccaggagcttgcagcctcaagccagcagaaagccacccttcttggggaggagttggccagtgcagcagcagccagggaccgcaccatagccgaactacaccgcagccgcctggaagtggctgaagttaacggcaggctggctgagctcggtttgcacttgaaggaagaaaaatgccaatggagcaaggagcgggcagggctgctgcagagtgtggaggtagagggatggggggtacctggcaatctgatggccactgcccccacctctgtggggactcctacatgtggtcagaccctctgggaggagagaagaggggttgagaaccttagaggacttgggtggagaggggctttgagggaggtacactttactttctaggcatgacccatccctaaccggggtatcccaatcctgatcaccagagtaccttccttggaacagaaacattttctgtcctagaccccaggccctgccataatgcccattcctgatcaagcagcacctgccgtcatgtcctgtccttcattcagagggtataggaaatgaaggcaaaaaggggaaagtgctctaaaaatgatgctttaaataaaggaaaggacacagtaagggatggtgctgttgacagtggcgttcctttttcttccccctccaccctcccattttccttcttggctatctctcaggcagagaaggacaagatcctgaagctgagtgcagagatacttcgattggagaaggcagttcaggaggagaggacccaaaaccaagtgttcaagactgagctggcccgggagaaggattctagcctggtgaggcatccagccaccaagggtcctgtcctatggcctcctgaggcatccataccccttctctctgtcttgggtatgggctcagaagtgctaggtgtccactaccatgttgggtggcatttcacttgcacacgcaagccctcattggtttgaaatgtgcatttttttctgctctcagggcacacatctgggcccagtagaggtgacttaggagaattatagagtggccccttggtatgaccaaggcctctgcaccccagcctagaggaagtcatgcaggtccccactcgagaggcagagactaagacttagaaaactgagtatctgtggcccaagacaaagtactcatggaggaagtgttgggaattcctgtgtgtgtgtgtcagagcagggaagaagcagaggcatggggagacctggttctagattgttggtcctggtcccagagtccaggttcttggaggtacattctaggctccagattccattgggccctcttccctcaggtacagttgtcagaaagtaagcgggagctgacagagctgcggtcagccctgcgtgtgctccagaaggaaaaggagcagttacaggaggagaaacaggtgagcacccataacccaggccccgtggatgccacaggtgaggacttgagggctagaaactttgtaaattcctgtcatctcttggcttagaaactgttctctccaagagggcccgtaccctggcttctcttattagctgatttggcaggacagcggatgatctctgggagaagggagggatgtaagtggtgaagcaggggtgctggggggagtgtctgcctgaagttgccccaatctttgctgaaggcatctaatgctgaggagctaagagttcttcttgggtgcagcttctgcaggctagcaaggttggcaccttcccattctctagcacctgcctttttccttcccaattccaggaatcgctagagtacatgagaaagctagaggcccgcctggagaaggtggcagatgagaagtggaatgaggatgccaccacagaggatgaggaggccgctgtggggctgagtccgtgtagccccaatcttgtaacacctcttccccactctacctcccgctgttgaggaaggctccatgtaaccttgctgggagctgcctttgccttctatgtgttttgccttttctttcccagaccctggcccctgtttagtctaatgatacccctcatccagaggagacagctggtccaactcctcacaacacatccttttttcttctctgcctgcttcatctcctacaggctgcccggcagctctgacagactcagaggacgagtccccagaagacatgaggctcccaccctatggcctttgtgagcgtggagacccaggctcctctcctgctgggcctcgagaggcttctccccttgttgtcatcagccagccggctcccatttctcctcacctctctgggccagctgaggacagtagctctgactcggtgagcagtggaggagcctgtgcagaagcagtaaggaggggcagggccaaacccaagtgtcccagcctggagtgcagcaccgatcttggctcactgcagcctctgcctcctgggctgaagcgatcctcccacctcagtctcccgagagtagctgggaccacaggcaggcacccccggctaattagagaaggaatcttagctatccagggctctctttttcccaggggagaggaggcaggcccagcctctcttcagtgccacaccagtagatatcatcccaaaacccagaccagcccaatagcctcactgcttctcccccacagtcattctcttattattcaccagcccctcaaaacgcctctcctgcctcactcttcctaagcccctcaggtcactgtcctagccttggctgctcttcccatacctgtcccaatgtgctgctcccccatcttgggacaccaccccaaagcccaaccctgtctctttggcatccaggaggctgaagatgagaagtcagtcctgatggcagctgtgcagagtgggggtgaggaggccaacttactgcttcctgaactgggcagtgccttctatgacatggccaggtgagttcaaccagcaaggccaggagggaggtgggaggaggtcagagggaaagggcatctgtgtggacagtcaccaggccctgctcccaacccctgcccttcttggcctcagccaagaaaaggagatacaggtatggttaacaaggaaaatgactcactgctccaaatcccagatgccttcaggtaatccctacccctatcttatcaatgcactcagaggtcctgcctttaactggcttctatgttgttctagcaccatcttctgcagagcccaaattgccctgcttcccctctctcctgcctctaccccttccccaaccaccaggtaggtacctagggtcctccggggaggaagggaggtgaccatggcccccagggataggagcagagagaagactgggatccagcatccatctggctacaactgaaatgctttccctcttccctgacttccctgggtaacccttagggaagggaacctatagaggtgggggtttcaggtatcagattgtccccttctgccttcccttttattcccaggttcaagggggcaggcacagggaagagagatttgatcatctagtcccggttttgcctggatgtgagatgggctcagggcagggagggggtgatgctgtcatccttctcggctggagcaggaagatgaaggacgatgtcagactcattttcagcctcattaggcagcagacggagatggagggaggagagcaggaggctgggggatgggctctgcactgcagagaccagcagggactaaagaagagaggacatggggaactggaaaaatagccttccaggattgtggggagaaagacgctgtgggagaggccaggatgctgcattagggcacaggataacctgggaacccaggcacatgggtcctgctctccgagtctgcaagtcaagaagggaacagagcacgccgaccctctccctttcccctctgtctgctgcttagtggctttgcagtgggtgccctgtcagaagccaggctctgggggccctgccgcccccacatggaaggagtgtcctatctgtaaggagcgctttcctgctgagagtgacaaggatgccctggaggaccacatggatggacacttctttttcagcacccagggccccttcacctttgagtgatcttactccctcgtacatgcacaaatacacactcatgcacacacacactcacacaacatgcatacacttaggtttcatgcccattttctatcacactgggctccatgatattctgttccctaagaactgcttctgtgtgccctgttttcatcccaagatttctcacttcatcctctcctacctggctcttttgtcccagggaggggtcctgttcggaagcagtggctgaatttatcccctgaaagtggttttggaggaaccgggatggaggaggccttcccctgtgggaatagaatcgtccactcctagccctggttgcttctgatacacagccactgcacacacacactcacactcacactcccttgtctgatgccccaaagccaattcctggggcaccctaccctctcttatttggagtttccgttggtttacctgagttttctctggggtctgcacagaggcagcagcatggacatcatggcctctcaggtcccttttggttctcagtttcattggttcctctttctgttcccccattgacttctgtgccccaccctagccttttccataaccttaggtattcagtttggaggggttttttggatttttgaggattcctgtattctggatcctctcctcgcatctcctcacatggaaagaaaataatgtatttgtgccttctgtgaggaatggggggaacaagtggtcccaggtatccccatttccaaggcccccctccctctccaggtccccccacagcaataaaagcttccccctgatatccatccctttgtagtttgaacaaatatatttatatgatatgtatga

SEQ ID NO: 1738 - DNA, 5538 bp, Homo sapiens
ctacacagaagacccaaggctgcgatgctggatacctcaatttgggagctggagactggatatgcaggattgagttatttgagctgagaacccaagaagggctggcaatagctgaaggcttgagtgtgtgttaaatctgagaagtggaaccttgacctctctcatcacaatggttcacctcccgagccaccccaacacacatacccctttccttacctgctttccacttccctcaggctgagctccaagtggcacaacaggagaaccatcacttaaatttggacctgaaggaggcgaagagctggcaagaggagcagagtgctcaggctcagcgactgaaagacaaggtggcccagatgaaggacaccctaggccaggcccagcagcgggtggtgagtgaggccccttggcaacaggaaacgggaaattccaagggcaagttgtagagaagcctgcgtgtctaaagagaaggggagagacatggctaaagactaaacaacacaaccccgagtcctaatgcagtggagtggagggagcgtttacctccctggctgatgaatgattcactaggaactctgatctccatctcctcctttctcctgaggccgagctggagcccttgaaggagcagcttcgaggggcccaggagcttgcagcctcaagccagcagaaagccacccttcttggggaggagttggccagtgcagcagcagccagggaccgcaccatagccgaactacaccgcagctgcctggaagtggctgaagttaacggcaggctggctgagctcggtttgcacttgaaggaagaaaaatgccaatggagcaaggagcgggcagggctgctgcagagtgtggaggtagagggatggggggtacctggcaatctgatggccactgcccccacctctgtggggactcctacatgtggtcagaccctctgggaggagagaagaggggttgagaaccttagaggacttgggtggagaggggctttgagggaggtacactttactttctaggcatgacccatccctaaccggggtatcccaatcctgatcaccagagtaccttccttggaacagaaacattttctgtcctagaccccaggccctgccataatgcccattcctgatcaagcagcacctgccgtcatgtcctgtccttcattcagagggtataggaaatgaaggcaaaaaggggaaagtgctctaaaaatgatgctttaaataaaggaaaggacacagtaagggatggtgctgttgacagtggcgttcctttttcttccccctccaccctcccattttccttcttggctatctctcaggcagagaaggacaagatcctgaagctgagtgcagagatacttcgattggagaaggcagttcaggaggagaggacccaaaaccaagtgttcaagactgagctggcccgggagaaggattctagcctggtgaggcatccagccaccaagggtcctgtcctatggcctcctgaggcatccataccccttctctctgtcttgggtatgggctcagaagtgctaggtgtccactaccatgttgggtggcatttcacttgcacacgcaagccctcattggtttgaaatgtgcatttttttctgctctcagggcacacatctgggcccagtagaggtgacttaggagaattatagagtggccccttggtatgaccaaggcctctgcaccccagcctagaggaagtcatgcaggtccccactcgagaggcagagactaagacttagaaaactgagtatctgtggcccaagacaaagtactcatggaggaagtgttgggaattcctgtgtgtgtgtgtcagagcagggaagaagcagaggcatggggagacctggttctagattgttggtcctggtcccagagtccaggttcttggaggtacattctaggctccagattccattgggccctcttccctcaggtacagttgtcagaaagtaagcgggagctgacagagctgcggtcagccctgcgtgtgctccagaaggaaaaggagcagttacaggaggagaaacaggtgagcacccataacccaggccccgtggatgccacaggtgaggacttgagggctagaaactttgtaaattcctgtcatctcttggcttagaaactgttctctccaagagggcccgtaccctggcttctcttattagctgatttggcaggacagcggatgatctctgggagaagggagggatgtaagtggtgaagcaggggtgctggggggagtgtctgcctgaagttgccccaatctttgctgaaggcatctaatgctgaggagctaagagttcttcttgggtgcagcttctgcaggctagcaaggttggcaccttcccattctctagcacctgcctttttccttcccaattccaggaattgctagagtacatgagaaagctagaggcccgcctggagaaggtggcagatgagaagtggaatgaggatgccaccacagaggatgaggaggccgctgtggggctgagtccgtgtagccccaatcttgtaacacctcttccccactctacctcccgctgttgaggaaggctccatgtaaccttgctgggagctgcctttgccttctatgtgttttgccttttctttcccagaccctggcccctgtttagtctaatgatacccctcatccagaggagacagctggtccaactcctcacaacacatccttttttcttctctgcctgcttcatctcctacaggctgcccggcagctctgacagactcagaggacgagtccccagaagacatgaggctcccaccctatggcctttgtgagcgtggagacccaggctcctctcctgctgggcctcgagaggcttctccccttgttgtcatcagccagccggctcccatttctcctcacctctctgggccagctgaggacagtagctctgactcggtgagcagtggaggagcctgtgcagaagcagtaaggaggggcagggccaaacccaagtgtcccagcctggagtgcagcacgatcttggctcactgcagcctctgcctcctgggctgaagcgatcctcccacctcagtctcccaagagtagctgggaccacaggcaggcacccccggctaattagagaaggaatcttagctatccagggctctctttttcccaggggagaggaggcaggcccagcctctcttcagtgccacaccagtagatatcatcccaaaacccagaccagccccaatagcctcactgcttctcccccacagtcattctcttattattcaccagcccctcaaaacgcctctcctgcctcactcttcctaagcccctcaggtcactgtcctagccttggctgctcttcccatacctgtcccaatgtgctgctcccccatcttgggacaccaccccaaagcccaaccctgtctctttggcatccaggaggctgaagatgagacagtcagtcctgatggcagctgtgcagagtgggggtgaggaggccaacttactgcttcctgaactggccagtgccttctatgacatggccaggtgagttcaaccagcaaggccaggagggcggtgggaggaggtcagagggaaagggcatctgtgtggacagtcaccaggccctgctcccaacccctgcccttcttgcctcagccaagaaaaggagatacaggtatggttaacaaggaaaatgactcactgctccaaatcccagatgccttcaggtaatccctacccctatcttatcaatgcactcagaggtcctgcctttaactggcttctatgttgttctagcaccatcttctgcagagcccaaattgccctgcttcccctctctcctgcctctaccccttccccaaccaccaggtaggtacctagggtcctccggggaggaagggaggtgaccatggcccccagggataggagcagagagaagactgggatccagcatccatctggctacaactgaaatgctttccctcttccctgacttccctgggtaacccttagggaagggaacctatagaggtgggggtttcaggtatcagattgtccccttctgccttcccttttattcccaggttcaagggggcaggcacagggaagagagatttgatcatctagtcccggttttgcctggatgtgagatgggctcagggcagggagggggtgatgctgtcatccttctcggctggagcaggaagatgaaggacgatgtcagactcattttcagcctcattaggcagcagacggagatggagggaggagagcaggaggctgggggatgggctctgcactgcagagaccagcagggactaaagaagagaggacatggggaactggaaaaataagccttccaggattgtggggagaaagacgctgtgggagaggccaggatgctgcattaggcacaggataacctgggaacccaggcacatgggtcctgctctccgaagtctgcaagtcaagaagggaacagagcacgccgaccctctccctttcccctctgtctctcttagtggctttacagtgggtaccctgtcagaaaccagcactgggggccctgccacccccacatggaaggagtgtcctatctgtaaggagcgctttcctgctgagagtgacaaggatgccctggaggaccacatggatggacacttctttttcagcacccaggaccccttcacctttgagtgatcttactccctcgtacatgcacaaatacacactcatgcacacacacactcacacacatgcatacacttaggtttcatgcccattttctatcacactgggctccatgatattctgttccctaagaactgcttctgtgtgccctgttttcatcccaagatttctcacttcatcctctcctacctggctcttttgtcccagggaggggtcctgttcggaagcagtggctgaatttatcccctgaaagtggttttggaggaaccgggatggaggaggccttcccctgtgggaatagaatcgtccactcctagccctggttgcttctgatacacagccactgcacacacacactcacactcacactcccttgtctgatgccccaaagccaattcctggggcaccctaccctctcttatttggagtttccgttggtttacctgagttttctctggggtctgcacagaggcagcagcatggacatcatggcctctcaggtcccttttggttctcagtttcattggttcctctttctgttcccccattgacttctgtgccccaccctagccttttccataaccttaggtattcagtttggaggggttttttgtatttttgaggattcctgtattctgtatcctctcctcgcatctcctcacatggaaagaaataatgtatttgtgccttctgtgaggaatggggggaacaagtggtcccaggtatccccatttccaaggcccccctccctctccaggtccccccacagcaataaaagcttccccctgatatccatccctttgtagtttgaacaaatatatttatatgatatgtatga

SEQ ID NO: 1739 - DNA, 5537 bp, Homo sapiens
ctacacagaagacccaaggctgcgatgctggatacctcaatttgggagctggagactggatatgcaggattgagttatttgagctgagaacccaagaagggctggcaatagctgaaggcttgagtgtgtgttaaatctgagaagtggaaccttgacctctctcatcacaatggttcacctcccgagccaccccaacacacatacccctttccttacctgctttccacttccctcaggctgagctccaagtggcacaacaggagaaccatcacttaaatttggacctgaaggaggcgaagagctggcaagaggagcagagtgctcaggctcagcgactgaaagacaaggtggcccagatgaaggacaccctaggccaggcccagcagcgggtggtgagtgaggccccttggcaacaggaaacgggaaattccaagggcaagttgtagagaagcctgcgtgtctaaagagaaggggagagacatggctaaagactaaacaacacaaccccgagtcctaatgcagtggagtggagggagcgtttacctccctggctgatgaatgattcactaggaactctgatctccatctcctcctttctcctgaggccgagctggagcccttgaaggagcagcttcgaggggcccaggagcttgcagcctcaagccagcagaaagccacccttcttggggaggagttggccagtgcagcagcagccagggaccgcaccatagccgaactacaccgcagccgcctggaagtggctgaagttaacggcaggctggctgagctcggtttgcacttgaaggaagaaaaatgccaatggagcaaggagcgggcagggctgctgcagagtgtggaggtagagggatggggggtacctggcaatctgatggccactgcccccacctctgtggggactcctacatgtggtcagaccctctgggaggagagaagaggggttgagaaccttagaggacttgggtggagaggggctttgagggaggtacactttactttctaggcatgacccatccctaaccggggtatcccaatcctgatcaccagagtaccttccttggaacagaaacattttctgtcctagaccccaggccctgccataatgcccattcctgatcaagcagcacctgccgtcatgtcctgtccttcattcagagggtataggaaatgaaggcaaaaaggggaaagtgctctaaaaatgatgctttaaataaaggaaaggacacagtaagggatggtgctgttgacagtggcgttcctttttcttccccctccaccctcccattttccttcttggctatctctcaggcagagaaggacaagatcctgaagctgagtgcagagatacttcgattggagaaggcagttcaggaggagaggacccaaaaccaagtgttcaagactgagctggcccgggagaaggattctagcctggtgaggcatccagccaccaagggtcctgtcctatggcctcctgaggcatccataccccttctctctgtcttgggtatgggctcagaagtgctaggtgtccactaccatgttgggtggcatttcacttgcacacgcaagccctcattggtttgaaatgtgcatttttttctgctctcagggcacacatctgggcccagtagaggtgacttaggagaattatagagtggccccttggtatgaccaaggcctctgcaccccagcctagaggaagtcatgcaggtccccactcgagaggcagagactaagacttagaaaactgagtatctgtggcccaagacaaagtactcatggaggaagtgttgggaattcctgtgtgtgtgtgtcagagcagggaagaagcagaggcatggggagacctggttctagattgttggtcctggtcccagagtccaggttcttggaggtacattctaggctccagattccattgggccctcttccctcaggtacagttgtcagaaagtaagcgggagctgacagagctgcggtcagccctgcgtgtgctccagaaggaaaaggagcagttacaggaggagaaacaggtgagcacccataacccaggccccgtggatgccacaggtgaggacttgagggctagaaactttgtaaattcctgtcatctcttggcttagaaactgttctctccaagagggcccgtaccctggcttctcttattagctgatttggcaggacagcggatgatctctgggagaagggagggatgtaagtggtgaagcaggggtgctggggggagtgtctgcctgaagttgccccaatctttgctgaaggcatctaatgctgaggagctaagagttcttcttgggtgcagcttctgcaggctagcaaggttggcaccttcccattctctagcacctgcctttttccttcccaattccaggaattgctagagtacatgagaaagctagaggcccgcctggagaaggtggcagatgagaagtggaatgaggatgccaccacagaggatgaggaggccgctgtggggctgagtccgtgtagccccaatcttgtaacacctcttccccactctacctcccgctgttgaggaaggctccatgtaaccttgctgggagctgcctttgccttctatgtgttttgccttttctttcccagaccctggcccctgtttagtctaatgatacccctcatccagaggagacagctggtccaactcctcacaacacatccttttttcttctctgcctgcttcatctcctacaggctgcccggcagctctgacagactcagaggacgagtccccagaagacatgaggctcccaccctatggcctttgtgagcgtggagacccaggctcctctcctgctgggcctcgagaggcttctccccttgttgtcatcagccagccggctcccatttctcctcacctctctgggccagctgaggacagtagctctgactcggtgagcagtggaggagcctgtgcagaagcagtaaggaggggcagggccaaacccaagtgtcccagcctggagtgcagcacgatcttggctcactgcagcctctgcctcctgggctgaagcgatcctcccacctcagtctcccaagagtagctgggaccacaggcaggcacccccggctaattagagaaggaatcttagctatccagggctctctttttcccaggggagaggaggcaggcccagcctctcttcagtgccacaccagtagatatcatcccaaaacccagaccagcccaatagcctcactgcttctcccccacagtcattctcttattattcaccagcccctcaaaacgcctctcctgcctcactcttcctaagcccctcaggtcactgtcctagccttggctgctcttcccatacctgtcccaatgtgctgctcccccatcttgggacaccaccccaaagcccaaccctgtctctttggcatccaggaggctgaagatgagaagtcagtcctgatggcagctgtgcagagtgggggtgaggaggccaacttactgcttcctgaactgggcagtgccttctatgacatggccaggtgagttcaaccagcaaggccaggagggaggtgggaggaggtcagagggaaagggcatctgtgtggacagtcaccaggccctgctcccaacccctgcccttcttggcctcagccaagaaaaggagatacaggtatggttaacaaggaaaatgactcactgctccaaatcccagatgccttcaggtaatccctacccctatcttatcaatgcactcagaggtcctgcctttaactggcttctatgttgttctagcaccatcttctgcagagcccaaattgccctgcttcccctctctcctgcctctaccccttccccaaccaccaggtaggtacctagggtcctccggggaggaagggaggtgaccatggcccccagggataggagcagagagaagactgggatccagcatccatctggctacaactgaaatgctttccctcttccctgacttccctgggtaacccttagggaagggaacctatagaggtgggggtttcaggtatcagattgtccccttctgccttcccttttattcccaggttcaagggggcaggcacagggaagagagatttgatcatctagtcccggttttgcctggatgtgagatgggctcagggcagggagggggtgatgctgtcatccttctcggctggagcaggaagatgaaggacgatgtcagactcattttcagcctcattaggcagcagacggagatggagggaggagagcaggaggctgggggatgggctctgcactgcagagaccagcagggactaaagaagagaggacatggggaactggaaaaataagccttccaggattgtggggagaaagacgctgtgggagaggccaggatgctgcattaggcacaggataacctgggaacccaggcacatgggtcctgctctccgaagtctgcaagtcaagaagggaacagagcacgccgaccctctccctttcccctctgtctctcttagtggctttacagtgggtaccctgtcagaaaccagcactgggggccctgccacccccacatggaaggagtgtcctatctgtaaggagcgctttcctgctgagagtgacaaggatgccctggaggaccacatggatggacacttctttttcagcacccaggaccccttcacctttgagtgatcttactccctcgtacatgcacaaatacacactcatgcacacacacactcacacacatgcatacacttaggtttcatgcccattttctatcacactgggctccatgatattctgttccctaagaactgcttctgtgtgccctgttttcatcccaagatttctcacttcatcctctcctacctggctcttttgtcccagggaggggtcctgttcggaagcagtggctgaatttatcccctgaaagtggttttggaggaaccgggatggaggaggccttcccctgtgggaatagaatcgtccactcctagccctggttgcttctgatacacagccactgcacacacacactcacactcacactcccttgtctgatgccccaaagccaattcctggggcaccctaccctctcttatttggagtttccgttggtttacctgagttttctctggggtctgcacagaggcagcagcatggacatcatggcctctcaggtcccttttggttctcagtttcattggttcctctttctgttcccccattgacttctgtgccccaccctagccttttccataaccttaggtattcagtttggaggggttttttgtatttttgaggattcctgtattctgtatcctctcctcgcatctcctcacatggaaagaaataatgtatttgtgccttctgtgaggaatggggggaacaagtggtcccaggtatccccatttccaaggcccccctccctctccaggtccccccacagcaataaaagcttccccctgatatccatccctttgtagtttgaacaaatatatttatatgatatgtatga

SEQ ID NO: 1740 - DNA, 436 bp, Homo sapiens
ggaaattagagataatggatctctcctctctccatcccaacccctctttattgatcctcctttaatgaaagttaattataacaatgatttaattaatagaatccctctcttcctttattgcttcccgtattaagactattaataaatacgagctgggctgacagaggcatccatcacccgcctgggattccccccatccctccttttaccttcccccctctccctctccctctcttggcctataaacttgccggggtagtgggggttaatcagagaggaattatgagccaacatccccagcaggaggtgcatttaatgaaatcatgtgtgatttattttctgggggaggttggggcgagaagaatctgggacccacacctcctggcttccagtgagtggctgccttgtgcaaaaaaggagaatagtagacaaacag

SEQ ID NO: 1741 - DNA, 368 bp, Homo sapiens
aaggcgagaggattgttcaagcccaggggttcaaaaccagcctgggcaacgtagtgagaccccatctctacaaaaaattttaaaaattagccaggcatggtggcatgcacctgtagtcccagctactcaggaagctgaggtggaaggattgcttgagcccaggaggtcaaggctgcagtgtgctgtgatcgcacccctgaacttcagcctgggtgacagagcaagattctgtctcagaaaaaaaaggggtggggtgtggggcctagtactttcaaacctttttagcagaaccctttcctctcctcccaccaataaagtttttaatcttgtgtggaatctcactgaataaacaaaaacaatgttttatt

SEQ ID NO: 1742 - DNA, 436 bp, Homo sapiens; identical to SEQ ID NO: 1740

SEQ ID NO: 1743 - DNA, 8896 bp, Homo sapiens
cggtggcggctgtgtgtcgccggagccgaagcgcgcaggcccgtcccggtggccggggagcgggcgggtgggggcgccatgtggttcatgtacctgctgagctggctgtcgctcttcatccaggtggccttcatcacgctggctgtcggtgagactgcacgaccccggcccgcgcgggctcccgccccggcatcggtgctcgttgggggtcgcatcgcgggggtttcggagccactcgggggaccactgcccggcgctcccggccttcgccgccccaaccccttcccgcctgatcctgcccctcctgtcgagcctggcagcccggcctgaccgtggctccttccaggtgtcacagagtccgctccggcactgcccgagaaagggtgactcgagtgccgcccccgcgtctgcggaccgctaaccgctgcggctcccactcttcgcgggcctgccgcgcggaacttttccccaacgcctaccgccgcctttgcgcctctggcccttcatgctccctgctctctccacctttgacacttctcctctggctggttcccattcggcctcagttgagatgtcatcttttccgggaagtccacaggggttgatggtccagcagtgccctgtcctttccctaaagtagcatttctcacactaaactcgtctgtctctccctactgttccccttccctttcccaagctgggtcagggaaggacccttgtctgtctttttcagctgtattctcagcccagggacctggctcatgccaagtgcccagcaggtgtttattgaatacgtgaaattccgttttctgagccagaggttatcattgtactgtggcatcaaatgcagactttcgttgatttttatgagatttgtccttagttgccctaagaaagttttacttctccagacttggaagggcaacacatgggatgtttggtttgttcttgaccttctggggtccatgaagggtggatggggactgggctgcagagagaggggtgaccaggatggtgggagtgaccctggctgatagtctccctgcctcccaccctgcagcggctggactctattacctggcagaactgatagaagaatacacagtggccaccagcaggatcataaaatacatgatctgggtaagtggcatctttctccaggagtcctcctcactcttttgccctgcctcaaaagcaggaagtggggagagtttggcatggatgatgaggcctgtgtctctgctgtttcctgagcatacactcttacctccttgccctgaacgctgtcttttgggtctgcactcctgggcccagatcttccctggccgccttccccaagtggcattgtttcactgcaggccttgtgctctagtccttaaggtgacagcgaagtgtacttctctgttgacaagaccgtagatttgactttgcttagctctctcccgctgtctttagccctttgctctgctcacagcatttaaaacttagaggagccataagacagttttgcatatatgttcattgccatctttctaatcggatcaagtgatttgtcctaagatcggcacagcttcgctgccctcgcccttccctggtctcatgggaggcttctcttactgaagacacagtccttgccactgatatcaaagccataggggtgactgctggtggacagacttccttcagctgcaggaaaggctgggggtaggggtgccattggagagaaagcgtccacagcccctcaagtcgcctggtgtcagcagccatgtgcactctgggcatggctgaggttgggagttcacagtggaggcaagactatagccctcagctctggtccagaggcccagcttgtgggtgttggcacagtaattagcccttcattcagccaactgtcatttgctaagcactgacaactgtaggtacttatcagtagtgtttttcaaactgtaggcatgattcattatttggctgtatagtaggtcacaatcagcattttttaaaaaaaggaacataaatagaattgaaatttgagctttgaatcatatatatgtatatatgtgttggggtcacagtgtaaaatgtttttctttttctttttttttttttgagatggagtttcgctcttattacccaggctggagtgcagtggcacaatctcagctcaccgcaacctctgcctcctgggttcaagcgattctcctgcctcagcctcccgagtagctgggattataggcatgtgccaccatgcctggctaattttgtatttttagtagagatggggtttctccatgttggtcaggctggtcacaaactcccaacctcaggtgatctgcctgccttggcctcccaaagtgttgggattccaggcgtgagccacctcgcctggcagatgtttttcttactgtgggttgctgtcaaaaagtttgagaaatgggctgggtgcggtggctcacacctgtaatcccagcactttgggaggccatcagaagtttgagaccagcctggccaacatggcaaaaccctgtctctactaaagacacaaaaattagctgggcgtggttgtgcatgcctgtagtcccaactactcaggaggctgaggcaagagaattgcttgaatccaggagatcgcgccactgcactccagcctggatgacagagtgagactccgtctcaaaaaaaaaaaaaaaaatgttgccttttgggagcagagaacctagctggggaggccagacctgtgaaatgaggagattgaagcatgaacctagtgctgcccagagcgggctgggggttggtgagtccaggaacgttgcctggaagaagcgccctgcactgtctgcctctggttgtttcagttctccaccgctgtactgattggcctctacgtctttgagcgcttccccaccagcatgattggagtgggcctattcaccaacctcgtctactttggcctcctccagaccttccccttcatcatgctgacctcgcctaacttcatcctgtcgtgtggtgagaggggacagagttggggaggcagctgatgtggttgggtgtgcccatctccatcctgggcactaaaggggatacagaaaaaggaagccagctgttgaagtcctccaggaagccaggctagttgggaagatgcggttcttactgctgaggactctagagcccaccttggctctagtgaatagaatttgttggggctggggactcagacagggagggctttcccagagaggtaagtttgaaggagagtttgggaaagaagaggttgtggattggctgaggcagggcccccaactgagcagttccagcctcaaaaaaaccacttggccagaaaaagcccaaagcccttccggtaggcaggcagctgtccgtccagtcctctgacccaaagtcattgttaggactggagcctcatggggctgtgagcaccttgcagactctggcctggtgtgaatgcctcctgggggctgcagcttctcatctcattctcactggctgccgctgcctcgggcttgagcctggatgtggaggacccagtcttcttggcgttgccctgccaccactttctgaccctggggaatcattggccctctctgggccttagcttctccatctattcagagaggatgtttctgaaagaactattgggagactcagtgggcatatagtaggtgcatataggtatttacagatattcctggaaaaggcttcggaaagtattttggttgccaagattgccattgctcctgttcatcattgctggctaccctagctttcagtcagggtatcagatggagttaggggttttttagagtgacttttctatttctatgagagagcctggagggtgaatattatccacacaaagggcatattgttaaagccaaaactggtttcttccttgggtgtgatttcaccaaagaatttgttcagcagaggtttgttagggagcccttccatggagaccaggcccctctgtccagggaagaagtcctgcccccagcccctcagcagcaggctcccctgacttcactcccttgatctgccctttaatgcctaaaagagtttttccaaaagatcttgtgggcaccaggcactatcctacctcccattatctcttagccctagagtgtggctaggcatagcagaactgtagtctttgccttagaatgggagaggcaggagagaagaaaggagacatgagaattgctgtgaggtgtgtgtgaggggacagtcagtttcaggggacatgttctttctggtgcctgcccttcacctcaccatgggaaccggcagggatgactgtctcttgagcagcctgtgtccaggatatgcacacgtgccctcttttataaactcagttacacaccaaggaggggtggctgtgtgtgtgtgtgtgtccagaacgtatcagttcacaccggtatgccttacctgggggcaggatgaggagggaccccctcccccagaatgttgaggaacctgaagactgcacctcaaagcatctagcaagtcttgcccttttattcctgaggagtgagagcctttttatttgagcaggccttctccttgctgcccagtttgtttatttgagcaggccttctccttgctgcgagtttggagtagagcctcttaggggcgtctggtctgcacacccatgatttctccccacctgtcactgtgggagagctttctttagccctcacatccacgaaaaacgaggttcatcgtcatgatgctttggattatgtaacatagaagtctcacttttataacatgcaaagagccttcttctaattttactcagaatgccctgtgcagtgggcaggttgaggctcattctcccattttagcagatgggaaacggttctaggcagtagcctactctgagttgagtgtaaagtcaggcctaagactccatggaggctcccaacttctgagggccttttgaagttaaaagtacagctttctgttattccccttaaactgactgactcttcattccctcaacaggactagtggtggtgaatcattacctagcatttcagttttttgcagaagaatattatcccttctcagaggtaagaagtgtccagcacattcagctgttaacagggacagggtagtaaaagggaacttgcatggtttactttataaacttagctatgatttgaaactgaatctgttcaaggattacatgtttgaaaaaaacaaaacatagatggtttgagaaagctgtgtggatggggacagactgtgctcatttggccgaggtggggaggacactgctcttcctcagtgagtcctttgggtccccctcgaggggtcatcctgaggtcaggaaggggtactagggtgaccttctctgacacagtcctcacagggcagggatggactgcacccctgagccccagcttttcccagtggccgccaaggttttcttctcccacgatttctccacaccctgctgctccagtttgaacctctgggaagagcaaggtcacttctttggggggtgtgggtcagtcagtcatggcttagcactttgtctgcctccttcagtccaggggagttgcttgtcctagcgaccaagatatggggtttgtggccacattcagtcattttcagcctccacctttccccacagaaggatttccatgtctgagggtggcgttccctgcttcccaggcctgggccccctttggagatcaggtgtggccccctgtgcactcttgaccaacacgcagtcaccacacccagcccactcttggcacctccggggcaccctcttctcagtctctcttgttgccaggtcctggcctatttcactttctgcctgtggataattccgtttgcgttttttgtgtcactttcggccggggagaacgtcctgccctctaccatgcagccaggaggtgagaagggatttgtaaggggcccaggtgggggcaagccagcaaggcctgggttggcaggggtccactgagggaacctgaatctagccctgtgttggagacacctggactcggggttgggagggccgtgttcacacacatgcgcacacacacacacacactctctctctctctcatattcttgcctgtatctccacagatgatgtcgtctccaattatttcaccaaaggcaagcggggcaaacgcttagggatcctggttgtcttctccttcatcaaagaggccattctacccagtcgtcagaagatatactgacccccatgcaggcaggatgtggggggcaagatcaggagagtcaggcccctgggcctctatgccaggtggggaccagaagtcgggaaggcacctaccacctgccctggctttcttcccctcaactctggagccccatccccaccctccttggggggctcagcttggctcagatctgatgcttcaagaggctgtaacctcagagggcaccaaggagggtggcagagcctgcttagccaggaggccgaggtccctcagtcctcccctgtcccttccaaggtgggtcaggaggttctggccccgctggggcaggcagggcagggtctgtgaagcttaagagcagatggtgacaagttctctgggcaggtggccatggggaggggccatggcttggcatgtccaacagaaatagtttttgctgttgaacggtgatttctgtccaagtgcagatttccgtttgaataaagcttcgcttctaggtggcactgtttgccttaataccctgacagttcatcttcctttcttcctgctaaccttctgctctggactggactcacttttctgctccagggactccttttctgggtttgggtcttgcccttcccaagggactgttcttgtggcccttaatgggaagggggcaggggtgaggagctgagcctgctcaaggagtgggaagtggggctataggcagcctctctgatgcactctcttccatctctttccccaaggctccgtgactgtcaaactgggagtaggagaggggacaatttaggactgggctagattttcagaagaacatctacaatatcctatttataaatcttcctctgggaaaaggagtggtttctggctgaatactatcttaggctcaaggagaaacaaaataaaaattagcttccaggcagcctgtttttaaagaaatgggactaatgggagaagctgtttgtcactctaagagcatccaagccctggcccgtctgtgcactcttggctcctggggagatatatctgccttctaagaaggcaggccaggtcttgggcacagacctgcatttgttgaccttgcactccaactatagtgccttgcaagtgctcaacagtacatattggaatgaagtccctatgagagccatttctggccatgttctatacctcaaagtgaggctggcaggtacagagatgaactgtacacatgtgatacatttaagccactggaaaaacccctgtgcttgaaaatatttcctctatatcatgcctggagttccatcatagcccttcatttccttggctttagcatttaccttctcttaagaataccagctttcccctttccctgagaggaagagcacatgttggtctcctcttagtgtgaacgagattgccaggcccttttctcctatgcacaccaggatagacaaggcaggggatactggcagcctgcatcatcctcccattgggctgacagctggccctactttcctccctctgctgcttggtccctcaccttgatgatgtggcttcgccccctccactctactgccagtgttctcccagggcttgctaaatccagcagacccctttcctgtcttactagatctgggcagcatttgacatggctgatcaccccttgcttcttggatggcacttccctggcacctctgtggctagttgtcctacctccctggctgttcctttcaggcttccgtgcaggcttctccacttgcccatgcacagtagggtctttcagggttctgctgtgggctccctagggaagcccatccatctggatggtttcaaggatggtgaggaatttagagttgacctccagccccaacatccttcctgatcacctgaaccacagttttgctgccctctaggtgcacagacaattcaggtccatggcccagatggtacttgctgtcttctgcaaacctgccccttctgggtacttcccttgaccccgagatcactcaggagccagacaggaaacttattctattcctgttttctctttctgcccaccacatccaatctctcaaaacggtcaggtctaccttaacatctcttgatttgagccactcccactgtcatcagctttcacctggattatcgtgacagcctcctactgcttctctatcatgtggccagagctatcttcctaaaatgcattgcatagttgatcaagtcactctctggcctaaaaccttccttggctccctgctgccctcaggataaagtctggacccctcagcatggcttgtgagactcatggtgtccttgtccctgctcacctctctggtctcatcacttgccttcttgcattctgggtcccagcctcctgtatccagagatgcagtggctctccattgccactctgattcctcctttcttttggtcacagagaaagggtactttctctgtcaaatctcaacttagacttgacttcctccaaggagctttggctatactctctcctcccgacccccaccctggcatactacacagatcactctgggctcacttgcctgcctaatggtcatctccccagtagactgtaagctccttgagggcaaggattgtgttggaatttttgtattaacagtgcctggcttggtgcctggcacctagaaagcactcaataaatgtttgtttaatgaatg

SEQ ID NO: 1744 - DNA, 854 bp, Homo sapiens
tagcagggaagcccatgccagggggacatattagttgccctccaccccattctgggtctcagcttagagcctgcagcaggaagggcttaatctgaacaagaaacagaatttcccagtgggtccttccatcctggaagcctgggcccttagggctgggagggcagtgggggtgccaaaatgtgacaacttttacaatgccaaggtgaagaatagtgtctgaccccccactctcaacctaacttggatttcctggcggcggtgggggggtgccaagagatttatttgcagagaaaagggaggcctggggtctgggcttttgattgggaagggtgactcctcgagcttgggagtgggaagcccataggcacccctccccctttcctcgccacccacaacgtgaattgccacacttcagccttcactgggctgcctcagggggagaggtagccataataactttatgggttggtttgtggggagggcagggtggggagtccttgatgagatcgcacagctgccaggaaggcttcatcgaatgtgtcacgcaggttcatggccagagtgtcggtccagaaggtgttgtcacccaggtgccgcttcctgggcacttccctcatgctgatggggtaaaagccctggggcaccttcattctgtatggccatacacgtgggtacagcatgcgcagcagcacctcaaaaggcagccgcggcacgggcgccacccagtggccgtccactgtgtgcagccgcgcaccgccgtgcccatcaggcctcacctccaggaagctgctgaagtcgtgctccggagtggggtctggatgcacgcccaggcggatgccctgcgagtggctgat

SEQ ID NO: 1745 - DNA, 397 bp, Homo sapiens
tcttgttctacatactttattttgcatgcctgtctccgccactagatgggagacttgttgacaaggactaaccggttccaggtgcccctcaggaaccctcccagaggtgtagtaaatgcatccagcgcctagcggacgccctgcgtgcccggcaaggggtgaggtgcaggcgatacaaaggtgcagaatgtaccccaaaagaacagcctagaggggaattaggccggaggatgaccgattaaaatcaccccaactcctgattgtgccgcttcctaggtgcatgacccagggcaacttcctttggccccggcttccccgtctataaaatgatttacattatctgctcaaatttccgacaagaacacacctcgcctttatcacagagcgtggcacatat

SEQ ID NO: 1746 - DNA, 364 bp, Homo sapiens
aaccaccatcaaacaggattttcgcctgctggggcaaaccagcgtggaccgcttgctgcaactctctcagggccaggcggtgaagggcaatcagctgttgcccgtctcactggtgaaaagaaaaaccaccctggcgcccaatacgcaaaccgcctctccccgcgcgttggccgattcattaatgcagctggcacgacaggtttcccgactggaaagcgggcagtgagcgcaacgcaattaatgtgagttagctcactcattaggcaccccaggctttacactttatgcttccggctcgtatgttgtgtggaattgtgagcggataacaatttcacacaggaaacagctatgaccatgattacgc

SEQ ID NO: 1747 - DNA, 686 bp, Homo sapiens; identical to SEQ ID NO: 1156
  misc_feature (95)..(95): n equals a,t,g, or c

SEQ ID NO: 1748 - DNA, 364 bp, Homo sapiens; identical to SEQ ID NO: 1746

SEQ ID NO: 1749 - DNA, 288 bp, Homo sapiens
attaagcgcggcgggtgtggtggttacgcgcagcgtgaccgctacacttgccagcgccctagcgcccgctcctttcgctttcttcccttcctttctcgccacgttcgccggctttccccgtcaagctctaaatcgggggctccctttagggttccgatttagtgctttacggcacctcgaccccaaaaaacttgatttgggtgatggttcacgtagtgggccatcgccctgatagacggtttttcgccctttgacgttggagtccacgttctttaatagtggactctt

SEQ ID NO: 1750 - DNA, 288 bp, Homo sapiens; identical to SEQ ID NO: 1749

SEQ ID NO: 1751 - DNA, 149 bp, Homo sapiens
aaacaaaaaaaaaaaaaaaaaaaaaaaaaaaaaaaaaaaaaagaaaaaaaaaaaaaaaaaaaaaaaagaaaaaaaaaaaaaaaaaaaaaaaaaaaaaaaaaaaaaaaaaaaaaaaaaaaaaaaaaacaaaaaaaaaaaaaaaaaaaaaa

SEQ ID NO: 1752 - DNA, 151 bp, Homo sapiens
aaaaaaaaaaaaaaaaaaaagaaaaaaaaaaaaaaaaaaaaaaaaaaaaaaaaaaaacaaaaaaaacaaaaaaaaaaaaaaaaaaaaaaataaataaaaaaaaaagagaaaaaaataaaaataaagaaataaataaaaaaaaaaaaaaaaa

SEQ ID NO: 1753 - DNA, 202 bp, Homo sapiens
aaaaaaaagaaaaaaaaaaaaaaaaataaaaaaaaaaaaaaaaaaaaaaaaaaaaaaaaaaaaaaaaaaaaaacaaaaaataaaaaaaaaaagaaaaaaaaaaaaataaaaaaaaaaataaaaaaaaacaaaaaaacaaaaaaaaaaaaaaaaaaaaaaaaaaaaaaaaaataaacaaaaaaaaaataaaacaaaaaaaaaa

SEQ ID NO: 1754 - DNA, 4171 bp, Homo sapiens
aggtcagaccgggaagctgatgtatgtgatgcacaactcagagtacccattgagctgtttcgccctctttgagaatggcccttgccttattgctgacaccaactttgatgtgcttatggtgaagctcaagggctttttccagagtgctaaggccagcaagattgagacccggggcaccaggtaccagtactgtgacttcctggtgaaggtgggcacggtcacaatggggcccagtgcccggggcatctctgtggaggtaagaccttggtgaaaataggagcaggatgttctgagggggctgcttagcaaagggctctgaagattttccagttcttctctttttttttttttgagacagagtcttgttctgtcacccaggctggaatgcaatggcacaatcttggcacactgtagcctcgacctccagggctcaagtgatccttccgcctcagtctcccaagtacctgggactacacccaccgaattaaatttttttttttttttagtagaaatgaggtcttactatgttgcccaggctgatctcagactcctgggctcaattgatcctcccatctcagccccccaaagtgctggggttacaggtatgagccaacacacctggcctccagtcctcaatttaaacagatatttatgcctacctgatccctgactccaaggcatctatgcttcctcttcgtgaatcttttatcctttctttaattattcagagactctctaacacagctggcaagtaggaagcgggaagctgggttcaaagcaagcagaaagcttcattaggaagggtggcttgctggagaagggaaaagatagtcaaggaaggcaggtgagttatgatatggagggacagtcacccatgacaagaagttctggagcagaccaggacaactcttagaacaattttctggcggtgggccctaaatcacatatgcccatatacctttccttagtatgctttaagataggttgggaagcaaaaatgtgcttttccttttgacatgctgtctgctttctttcatggtagaaagagtgtttgtgtgtgagatcacttcatctgtgacacagagagtgtgtgtgtgtctgtgtatacatacacatatatagtgacaaggagtgagagtggcagtgtagcagtggctggcttctttgggaccagggaaagttcacaacctataatgtgcccagcactgagataagaaaacaagtaagcttgcaggtctaccctttgaaaatttgtgatttatttattaagagtgaggctgaaacacacaaactctttttgaagttagtctgaaaatgctataaaagaggcagttggctctgggaattcaggccagtgtgaacactgctgactttggttgtgatgcttcctgaggatcaacatttatgtagggatttaaaatgtagagacatggggatagataagtctaggaagaatcccagttggagaaaagggcattagtggtagtttctgctcagcaacctctaggaccaagacttctaaccctttcggcttgtgatagaccttggatttgctgagacccactgaggacccgctgtttatcctccacatttctaatcttgtagtagaaacacactccacctgtttctttacttatttctccttagggttgccagtaattttgccctgccatctctccagtaaaaaattaagagagcagaaggagaaaacctaagatgtatattttttggcccatgacacactatttgggaaattctttcttagggtcagaacccaggttggttctacttagggagtaaaatttggtcttgaaaaaaactcatgagcatatgtgtccactctactctctacttaccacccccacacacattttccttctctttctctttgttgtgtctcttagaattttcttgagctctccttgaatctttacccagcatagcagggacaacacagtcctgagatcatcaaaaggggcccagatctgcttctgggtcctctgggagggctgcgggttggcacagctccaggatgagaaggtcaaagatgcctaaagatgctgggtattgagcccagtgtttaggttgaatgtttcctgtggaccaatactgtgctaggaggtgtgtgtctttagctcggggttggggaagatgggagcaggaggcaggaggtacaagagaagcagaccttgtcttagccttcattcaccctcattctctgtgcttttggttcccaggtggagtatggcccctgtgtggtagctagtgactgctggagtctgctgctcgagttcctacagagttttctaggcagccacacaccaggggctcccgcagtgtttgggaacagacatgatgcggtctacggcccagcagataccatggtccagtacatggaactcttcaacaagatccgcaagcagcagcaggtgccggtggctgggattcgttagtgatgagcagctgccagctgagctctgtcaccaggggtactccacaggaggagcaggtgctgactttcaggtccctggaccccagaaacccagggtagacatggactctactctccttctctggttctcagctgtggcttttgttctggggctgagtcccctccccaaccccctgactctcacacatagccccccatcagctgttttactccgtgccttactggatttggcctgtcctcaagaatggtaattatgaagagtggagaagtttggaccttgcctcctttaggggaaaggtaggacaggaatgtccctgcctggtactggtgggggaaatagtccgtatccccaactattaaggatttgtcccaggccaatggtgaacatgctgcattttatgtttggattgtgctgtaataagagcctcttccttccctcagaggatgtggctgggcttctatcctagagatggagtagaaggcacaactggtttgatagttactattttctgacctgtttgctgaagtgatttgcgaattgactttcctagggtgttgcctgagtcctttgaaatctccttctgacatctttcccttctgttgtgaaatatgttaagccacaggccaaactgctataagatcgaagtttgtttttttctcacctaataatagagaggtaatcagatggtctagggcagatttaactctacaaggttatcaggaactttgtttccttctgtcttattcagccattcccagtatgttttcttacccataagatcaaagcagactcatcagctccatatctgcattccactggggaaagagagagagaaaagagcagattttaaaaaaaagatatgactgagcattgctcagatcactgtggccacactttgctgaaagagatgctgggacatagaacctcttatctgggcagtcatgtgctgagttaaaactcagggattctgtgactacaagatgaaagacaatttggttgctgagatgcagttaatggcttctgttacatggagctcaatggacgtgcccaggaatgcttttggctgttattttgcagttaatacctcctgtaactaaagcatttgtttatgagttgacttgagagaagggctgatctcagagccgctttgagctaagttggattagtcacactaggaagttaattccacacctttcgtctaagtctcagtattgaggcctctccagttctcatgcaccctgatcttagggttagaatacttgaccctgatacctgcaccatgcttcatggttcctgagctctttctcctgtttcatttgagcctccaaactacatatttggtcatattgcctgcctaccccatgcctgctgcagaaatattcatccaggttaaccttgatatacacagagatggtcttggagaattgtgaatgtatgtactgtattgtcatcaaggatactgtcccttatttgaaggcatctaaagagaaactgttttcagatccaagtgctcagatctaaagcctctgcaacaagtcaggtggtggtcatgtttcccttctagttttggctgacaggaagctcagttcagtaccataactacagaacctgtcatctgtattttttgttctcaccccgtttttgttattttgtttctggttttttatattgaggtatgttttagatatagtttacaaaaataaaacgcacagatctta

SEQ ID NO: 1755 - DNA, 158 bp, Homo sapiens
taaaaaaaaaaaaaaaaaaaaaaaaaaaaaaaaaaaaaaaaaaaaaaaaaaaaaaaaaaaaaaaaaaaaaaaaaaaaaaaaaaaaaaaaacaaaaaaataaaaaaaaaaaaaataaaaaaaaaaaaaaaaaataaactaaaaaaaaaaaataaaaaaa

SEQ ID NO: 1756 - DNA, 170 bp, Homo sapiens
gaaaaaaaaaaaaaaaaaaaaataaaaaaaaaaaagaaaaaaaaaaaaaaagaagaaaaaaaaaaaaaaaaaaaaaaaaaaaaaaaaaaaaaaaaaaaaaaaaaaaaaaaaaaaaaaaaaaaaaaaaaaaaaaaaaaaaaaaaaaaaaaaaaaaaaaaaaaaaaaaaaaa

SEQ ID NO: 1757 - DNA, 151 bp, Homo sapiens
  misc_feature (4)..(4): n equals a,t,g, or c
  misc_feature (45)..(45): n equals a,t,g, or c
  misc_feature (89)..(89): n equals a,t,g, or c
aaanaaaaaaaaaaaaaaaaaaaaaaaaaaaaaaaaaggaaaaanaaagaaaaaaaaaaaaaaaaaaaaaagaaaaaaaaaaaaaaaanaaaaaaaaaaaagaaaaaaaaaaaaaaaaaaaaaaaaagaaaaagggaaaaaaaaaaaaaaa

SEQ ID NO: 1758 - DNA, 77 bp, Homo sapiens
aaaaaaaaaaaaaaaaaaaaaaaaaaaaaaaaaaaaaaaaaaaaaaaaaaaaaaaaaaaaaaaaaaaaaaaaaaaaa

SEQ ID NO: 1759 - DNA, 77 bp, Homo sapiens
aaataaaaaaaaaaaaaaaaaaaaaaaaaaaaaaaaaaaaaaaaaaaaaaaaaaaaaaaaataaaaaaaaaaaaaaa

SEQ ID NO: 1760 - DNA, 117 bp, Homo sapiens
gcagtggcacaatctcggctcactgcaacctccgcctcctgggttcaagcgattctcctgcctcagcctcccgagtagctgggattacaggcgcatgccaccatgcctggctaattt

SEQ ID NO: 1761 - DNA, 1940 bp, Homo sapiens
atttgtaaccaggctgtcattccatgtttgtttggaagcttagagataacatttatgaactttgtgacacatagtagttgctcaataaatgttaactgtagaaacacattgattagtttcacttcagaaatagacacttagagttcaaaattcccatctgcctagctcctgaggcccactttcttaccagaatctttcctgataccctctcctgcataaaatggttcctcttttgagactttgtagctcttttgtacttctcttattctgttacgttactgcaaaaaaaaaaaaaaagaaagaaaagaaaagtgccaattgtgtacatgctttcctccctgctggaatgtaaactttgtaaaggcatgatccatagcagatacttcttattacaaactacctggcagaatttctttctaaagaacctactcagtaagcctgttggtgaactgagcaacatttggacaattatggcatcatcttacaatttttcagctattggttttcacttgtttagaaatgtaaaactttgcaaggacttttataaaagcaaatttcagaatagttattcactaagcttttttatgctaatgatgtcatgctatcaaaaattagctagagtaaatggactgtaatgaggatggtttgtaatctagattatatgttccacatgtaacatcgaaatgaaatataaaattgagttgttggcatgtggttgtggtgagcagaagcagttattatacattacttggtaaaattcatattcatatcttgtcagtttacagtgagccagagattaaaaataacatttgtttctgttttagtaactgcttaaaaatatccaaaatcattttattttctttagcctgacttctagtagtgttttgaatatgtggcctttcaagcagtaatgaaatgcatcaatgcgacttggcagtgcctcacaggacatgcttctaggatcatttttaatgattaaaagtcaaattgagttctaaaaaactgacccaaaatatagatgagccaagtaaaaacggaaggaaatctgaataaaatcttggttcttggtcctctgcatgtatcctccacatctgttttctccagatctcttttttcttgcttgttgatagcacagaggaagatcgcagagagtaatgtactgtatatgtttcacatcccccttcctctttagtgatagtttggagagtatactgcagtcaccatggttttcagtttggagagtacaaggatcagatctgtattttctagagccagcttttgtggcattctggagaggtgattggagaaccatgagagcaggcagacatctgggtgagagggcacgaggggtgagtgacggcagagccagacttgctggagaggcagaaagggaaggattcaagtagcataaccaggaaatagaattgataggatttggtccctgctgacctgtggaataagggggaaggcagaggagttgattctagtatttctaagttgggccacttagtgatattggggtaccaggaacaggcttagtggacccacagaagtgaccagacccaggagtctctctgagcgcccaccctggcttctctgtgttggcttaccctttcttggttgggggtcatggggtggtcagcttcagtggtgtggtctgaggtgacaggtgctcaggagtgaggacagggagtagacatcaccaatgtgaatgtggaggtaggcaacaagagttattctagaactgacaaatttaatatattttgctgactgctgagttccatttggacaaatacctaatgcatttggggcttaaaacctagatgacgggttgaagggtacaacaaaccaccgtgatacatgtatacttatgtaacaaacctgcacgttctgcacatttgtcccagaacttaaagtaaaaaaaaaaaaaaaaaaaaaag

SEQ ID NO: 1762 - DNA, 292 bp, Homo sapiens
atttgtaaccaggctgtcattccatgtttgtttggaagcttagagataacatttatgaactttgtgacacatagtagttgctcaataaatgttaactgtagaaacacattgattagtttcacttcagaaatagacacttagagttcaaaattcccatctgcctagctcctgaggcccactttcttaccagaatctttcctgataccctctcctgcataaaatggttcctcttttgagactttgtagctcttttgtacttctcttattctgttacgttactgcaaaaaaaaaa

SEQ ID NO: 1763 - DNA, 689 bp, Homo sapiens
aatttttcttttaatgcagtatgacacagaaaacatttggaggatgttgaaaagtaattgtttaaattggcaaagacacatttcagtaagggagtaaacaagagggaaacgtgttggggggaaaggtgtggggaggaaactctagaccagaggccctaggacttgaatatacaacttagtcctgttgaaaattcagattcctgggccttaaagtatgttaaataggtcaggggtggggcccaggagttgtacttttaacgagcaccctcctgtgattcatttaacataaaaggtccttggctcacacttggagaaacactgctgtagaaactcaaatacctattttaaaacaaaggtacattttaatcatttagtttaaaatgaaatcattgcataatactgatgttagaggttagaataaacatgtacttaagttcttgatattcttgtcatttcagttacatgtcagggaatgtgatttgtgttttgacgtattcaaatccttgtcatattcaaccatattcgtattcaaaatatataatgattttgacccttgattgttcgaattaagactgtcatcttttctgtgtgattaactcttgtgttgatataaatatgcctttggcttactaatgttcagtaagaactaatgactcttgggaatgttaatagactctgtgagtcccttt

SEQ ID NO: 1764 - DNA, 102 bp, Homo sapiens
ctatgggaggattgttgttattattgcttgatttacatgctctcattttatacaaagtgtacagcacaatttctcaaagagtaattatgatgccaagaaaat

SEQ ID NO: 1765 - DNA, 689 bp, Homo sapiens
aatttttcttttaatgcagtatgacacagaaaacatttggaggatgttgaaaagtaattgtttaaattggcaaagacacatttcagtaagggagtaaacaagagggaaacgtgttggggggaaaggtgtggggaggaaactctagaccagaggccctaggacttgaatatacaacttagtcctgttgaaaattcagattcctgggccttaaagtatgttaaataggtcaggggtggggcccaggagttgtacttttaacgagcaccctcctgtgattcatttaacataaaaggtccttggctcacacttggagaaacactgctgtagaaactcaaatacctattttaaaacaaaggtacattttaatcatttagtttaaaatgaaatcattgcacaatactgatgttagaggttagaataaacatgtacttaagttcttgatattcttgtcatttcagttacatgtcagggaatgtgatttgtgttttgacgtattcaaatccttgtcatattcaaccatattcgtattcaaaatatataatgattttgacccttgattgttcgaattaagactgtcatcttttctgtgtgattaactcttgtgttgatataaatatgcctttggcttactaatgttcagtaagaactaatgactcttgggaatgttaatagactctgtgagtcccttt

SEQ ID NO: 1766 - DNA, 58181 bp, Homo sapiens
agtttgctggaacattatcagatggcttagggaagacgatggacaatcggcatcagtcagagcgggagtacatcaggtaccatgcagccacaagtggtgaacaccttgtagccggcatccatggcctggctcatggtaagtcatgggtgacatcaggctctgctgctgctggtcctcagaggcgcctttgtatcaatctgattgcagctataaaaaaagaaaggtgggctgggcgcggtggctcatgcttgtaatcccagcattttgggaggcctaggagagtggatcatgaggtcaggagtttgagaccagcctggccaacacagtgaaaccccgcctctactaagaatacaaaaattaggccaggcacagtggctcaatcctgtaatcccagcattttgggaggtcgaggcgggtggatcatttgaggtcaggagtttgagaccagtctggccaacatggtggaaccccatctctatcaaaaatacgaaaattagacaggcgtggtggtacatgcctgtagtcccagctactcgggaggctgaggcaggagaattgctcgaaccctggaggcagaggttgcaatgagctgagatcgtgccactgcactccagcctggcaacagagcaagactccaattcaaaaaaaaaaaaaaaaaaaaaaagaaaaggctgacaacagaggaaatcctgtgttggcgtacctgatagccttccaagctctcttactttatcctccttgcagttgaaatacgacagccggtgagaactcctcattcgctttctgaatgttgtgcacattgcaattccttttcgttctctggcttctgttcccaaagtatcataaggtgtaatcaaccagacctgttcttagaattgtagctgctacttctcttagaattgtaacctctgccttctccttactgatcattccttccaaagaaattgaaatgaggaatttgtggccaggtttgtagcccaggtgttttttagttttacataaatgtgcattcactaaaattataaatttatttgcctaagagatgttggtgatggcatgaatgcatttggtctctgactttgaattcttttaatgctttaattctgagtcatttgccttttgttgcatttttcttaacaatttcttagtacggcatccaaggcccttggaactataaatccagccaattttccaaccaccatccttcagccatgctgcactttggccacacacagctatgtactgcttcccaggtgtgcttccaagtccttgctcacacatggtccttctgctctccctcctctgcctcatttccttgtctatcaaaatcctactcagcctgtaagtcccaactcaatacattttcccagctctattgtccctgttagagttaatgacagagcacagtctgggttgtgtatgtcaccagctgtgtacatctgatagattgagaatgtgaggaggggagaaggaccactttgcattcacctttctccttgtgtacctcacatgacacctggcacatagctcatgcatagtaaggcttagtaaattaaactctttgtaccagatccttaggaaccatccaaagctatcagagtcatatcaagactgatcagtattaattatctgcatttggaagaagaggaaggaatatagacagtaaaatattatatttctatttgtgcttaggacacgtttagaatagagtttttgtttatcagctttcctaatggtgagatttggatcaaaatgcctttgcttttcctaaggctgcccaaccgtaaagggagctgtccctaaggagacgtcaggccagaagtgaaatttggctgaaagtaatttgtttatggattttaaaagttgactgttgggcaatcatttggggttaaggtttaatcattctttctcgtaatggtaatgacagtacattggactcttagaagacttttaaaatgaatataaaatgctttgttatgtgtggtggcctttatctggccagcatccttgtgacgtggagagagcatggctctcctcactttctggatgaacacacaaatgtgctgagaaaatgcatgattggttcaaagttgcaaaatcacctcccatcaagaatcattcctataatatgtacagcctctccaggagccaatggcttcatccaaagaggatccactgagctctgggttatacgaaggcagtatcctagagtgagagtcttcccttaggatgaaaagacctttagaaggtgataagaaccagaatccactcaatccccttgatgtaagaaatgggaattgtgctcagttctctctgcaggccttgctggacccaggttcagtcatgttctgtctctcaggtcccagtctgaattcctgttctgtgtgtgctctgccaaaaactttgttcaaaagtttgggaaagggctgggtgcagtggctcaggacagtaagcccagcactttggaagacctagagggagaatcgcttgagcccaggagtttaaggctgcagcaagcggtaatcatgccactgcactcctgcctgggtgatagacggacaccctgtttctaaaaaaaaaaaaagtttgggaaagagatattgcctcactggagcaaatttacccagaatccaaaagaaatgttgtgaattgttagtacattctcacccaaggagtttcctttaccaatttgtctcactagagctgaagagtctagagagcttcctcacaccccactgtcagagggtaaacatcctgtgagtgtccctggcacaggtcctggagatgctccctagacgggctgcctcttcccttcagtgactgtgacctcttcagcctctgccagcttctggcctcttctaaggtgttttcagccattgctgtcaacttgcaaaatgtttggaatgcctttttgacctggattggtcttttgaactgactccattgagggtcccagccagctttcacagctttttggggtgctcttcatgaaggttttatataatcgccgataccgaatttcatcaaagcatgcagtagcttttaccttatttcaagcatccagtggggttggccagtcacccccatagtgttctttgaaaattgcaaatgtataccatcagctctccatatccacagattcagccaaccatggatggaaaatatttggggggaaaaaagatttcacgaagtgccagaaagcaaaatttgaatttgccacacgtttcaaatactgtattgactccacacaaatgaagtgatatgtgggcatcgtattagctacaataaataatctagaggtgatttaacgtatacaggacggtgtgtgtaggttatatgcaaacacctacagcacattatgtaagggacttgagcatcctaggattttggtatctgcaggggatcctggatcaatcccacatggatactaaggaacaactacatttagttatctctctctgccttagatatctttcttttcttttctttttttttttttttttgagacagtctcgctcggtcgccagactggagtgcaatgctgcgatctcggctcactgcaacctctgcctcctgggttcaagcaattctcctgccttagcctcccgagtagctgggactacaggcacgcatcaccacgcccagctaatttttgtatttttagtaaagatggggtttcaccatgttggccaggatggtctcgatctcttgacctcgtgatctgcccgccgcagcctcccaaagtgctgggattatgggcgtgagccactgcgcccagcctctgccttatatttcataggatgccatcatcttcaaactttccccgaaggcccaattttctagtctcctgttgatttaatcctctatctgtatcctctcctgatcgtccgtaggctgcccaagctctgggatcgaaaaattggccactgttaacctctcagcttttctctgatttttttttttttttttttttgaactggagcacactttacttctgactaacatgtaacatatatcctctgactctggacttaatgggcaaatctgcaggatcctcttctgtgagttggcctgtctgtggcctctctggcacagagattaatagaatggccttaagttatcattccataatcaaggggtttggctttaaatgcttttgcttttgtcctcgtcaggttacaacagcccttgtctttttcactaggtatcattggtggactgaccagtgttataacttcgacagtggaaggtgtgaaaacagaagggggtgtcagcggtttcatatctggccttggaaaagggcttgttggcactgtaaccaagccagtggcaggcgccctggattttgcatcagaaacagcccaggcggtgagagacacagccacactcagcggccccaggtcagtggtgtgggaagaatggcttttgcagtttccagcctaggtctgctgcttctcctaatccatactgatgtgtttaattgtgcactttcttagttatagggtttttaattcaaatacttgtaactgaaatttctgatctgcctaatataaaaagatgaaaatgaggtacagaaacctggcatgaattttttcagataaatatatatatagcatattttatatatgctatatattttatatatgtatgtatatatagcatattatatataagtatgtataactatattatgttatttttctccattagagaggtcagaattaggattaaactgttagaagcttcttctgttcaccaagccaactggatccccacatgcctatgaagaaaactgtcagattgtagtctggttcttactcctacaccccgtgatatagttctagaatccccactgttgttgttcaccatgtgggtctgttccttcttaattttccttccgcttgaaagtatcagccccaaccccataaagaaaagtgccaccccccatccccccagcaggtcagcagttctgctgtgggattgctgtctggccttgataccagctgagactggaaatcagggacagcccatatggttccaaaccccacagaacccaactgctttaacgtagctgtttgcttgaatggcctattttagcctcccttttccagagtgactaattggggattcttatcaacaaagggtataatgaatgttaagggcccagccaagctagactcgacttaagcccagaaggattttgctgctgcttggataatagattttccctgagtgaattagtacgcccttttagaatgcctagggcctggcccacatccacaccctatcactccctcaaataggatgtgaagtgaaattgtccccaattgaagtgaatccatttgtctgtcaccaggaaaacttactgaagacacattactgcagtaggggaaatgctccgattgtggactggggccatgcagtgtgctgtgccagaatgccttccatctggaagcagctgagtaaactctgtatggtttactttagttaagttacattctattctcagatacaaaactaaaacaatccttgagtatattttgaagcatttatgaagttgtggggaggggcaggcagtgaggaggcttcgaaagtatttccagttagtttttccatctctgctcgaagcccaagaagtccacctccagtatttgttaagataataagacttaatgaagtgtaaagctgaagacgcctaagagttcccaaagaagcatgtgtattcttaaaatgtcaaaatagccaagggattggttgattaaaaagggttcaaggtatatgtgataaattttttaaagatgattttgtgctgtgaagttttaataatgttgacgagaaagaaacggcttgaattttatacattgtcagcttgcaagtcttcatgggggtttttcattctttttaggagcacaagtaatgtagccacagtcactgcagaaagaatgtctttgagagggacattcttgtcatttttattagttgttcaacattgccacagaagtttgattttctgtcagccagtacatagctgccatttattcattgcctgtcagtaaatagtgattgaaaatttcctatgaactcagggttgggaatagcagaaaccaaaactgtctctggtctcaaagagcttataatcaagcagggcagcaaacataaaaaattatataaacacttatttgctgaaattgtgacaaatgacatcgaggacacttagagggtgccgtgagactatgatcagagaaggtgatggggagaaggagggtggctaacctagtgatcaggggagttgagacaggcttttctaggaaagtaatctttgaggtgaagcctggagtatgaagtaggagttggccaggtgaagagaagagagaatcaccttccaggtaaaagggaactactgtgtgtgcaacagcaaaaggaaggaacttatctatgtgccaggcattgtctttgtgcctccacgtgtggaatcccatttaatcttcatagttgatttacaaatgaggacaagacagtccagagaagtcatggagcttgtccacagccacacagctggtgggaaatggtagacctagacttagacccagcctatgtcttgaccctgtgcccagcaccactgcattgcaccctgctgcctgggtctgcgaggagggggctcattggatttctcttgtacgtgtttcagagtcagttagtgtcaagatatggcattccacatagtttcttccctgctgactcaagatttactttactattacctgcacactgacatgattcaggtcttgaccaacactgcatttttgtctgtctgtttcctctggcctgccaccttagccttatctggacctcagcagcagagaccatgccctcatgaaggcactggggagccgttcacagtcagcactggccactcctcatctcagcccaatgaagttttacatttccatgtagatgaggcactcgggatatagaaaagttgtgcagcttgactcaaagcagacagtaattgggtagcctaattgaagtttaactgcaagttccaactttgtaggctgcagaaaaaaaggaaaaaaaaaaacaacaacaacaaagtttaactgcaagtttcatgagacagcgatctgcctaaccattcactcctcctagaagcaaaagctaccgtgatcattgaggcacagccggtcttcatatatcctcaaaggagggggattagcttccacatcccttctctattcctggaggtgccagtagtgggagagtcatggcagaagttaccagaggcaagtggggcagaggcaagtagggtatatgtttggatcagtggatcagtgtcctttattgtgcagaaaaagctaaaattacagattcttctgaagggatacatagcagccgtttcaccaatgtccctcagtccatttgtccaggtccagaagtattcatgaggagctatgcgttagaagagagcacttgggctgggcatggtggctcacacctgtaatccagcattttgggaggccaaggtgggaggattgcttgagcccaggagtttgagaccagcctgggcaacacaatgcccccatctcttacaaaaaaaaaaacaaacctggatatggtggcgggtggtgtgcacctctggtccttgctacttgggaggctgaggtgggaagattgctgaagcctggaaggttgaggctgcagtgagctatgattgtgcccctgcactccagcctgggcaacagtgagaccctgtcaaacaaggaaagagaacacttgatctggaaaacaacaggccagagtcccagccaccttacttattagctttgggccctgggtcaagtcaagacatctatgtaagactcagttttagttttttcatctataaagtggggataaatttatctctctgtttattctgcttctcaggggtttgaagcccaaccagagttattttaatgtggaagctataaagaactataaaaatgctgggtgatattattttaaagtcctattaaaggagcgcagagatccttgcaggtggagaaatgtttcagtgccagtttgttctgatgacactgtatctcttaggaacatactggctctaacactatcaccgagggataaatcaccctggtttcttggaagtgagttataaccatctccaaccatcccggttgattgaacaggatccaggggtgttactcagggtttttccccactgtttagacaacagggactaacaaatgatttgaagggattagaagtgagattctgaccgagggttgacctgagcccagggaccaagccaggaatagaacccaagagtccaagagttctgcctctgagcctgcaattggaatgagactttctgcttcctttgtaatatttcatccaagtaaaggcttagatcttagcatctatgttttaaaagacccaaattttaagcagatgataggaaagtaagccataaaactgtgaaagagtactccttccagtaatccatctgaaaagtggccttacaggaaacattggctcttttttgtgtttatttgaacatgattttatttatagggaaccccccctccttatgttcttttagattaaaatacttccaagttcctctccttgttggagtgcgctggcattccaagcgacagccacctaactttcctctgaaatttccaggcaacccaatagttctcaggaaggcaggtgggggtggggagagaagagggcggaggactgcagagcctttggcctcaacatgagtgttgtggaccaatatcccccactgcatttgttcactgtacaagtatgtgtggtttggaactgaaataagaaaccttttccaaggcaacgttctgctggctcaggttgcatcttctggcctacgtgtattgggccacactttgtctgttcccaagtaaagtttatgaaaatggcacagatgcagccacacttgaggtgccactgaagctatgtgaagagcctgctacccttcaaacagaccaggcccaagcaaggtgccaagccatgtgagagtgcccagtccactgtgtaaatgtgacggcctttgatggtagtgtttgaaaagatacttagtagaaagttgcagagacccgggagcagccatttcacaaaagaaggcaaaaatacctttgagaagaaaggaatgtctgcctctgcactatgtatttgcttgtttgtttctccaaataccatctgttgcagactggggtgcatgacattttaggtaagtagcagatgaagatttatgaagctgggccctgaggtttcctctaaaatatttcttcaccttttaagtcaagacccaaaagtggggagagaagtaggagttggcagaacttgaaatatttaaactaatttagcaaagctcaggagtgttggagcttatctcgttatttaagttagataaggaggaaggggaatttgaaggataatgatagatcagtgtttaagaatacagccatcaggactgataatgttctggaatcccgggaccctcggattgtgcacgtagatgtaaattccatttgctctgagaacttttgaaaaagaaagtttttggttgatttcacagaaaagatttatggtgggcatatttgactttttcagtaaaaatagccccaaaacaccacccaaaatctgttaagacacttctcgtgaatgacctcttagatgtgaaatggaaatgggttttcttaaggaaaggccccttttgttaacaatgtttgcatgttacttatgactctccaggataaaaggactaagactcttttgggtcaccagagcctgaatgcagtcaggttggacaggtcagcaaaaagtctgcaaagaggccgggtgtggtggctcacgcctgtaatcccagcactttgggaggccgaggtgggcggatcacgaggtcaagagatcgagaccattctggccaacatgtcgaaaccctgtctctactaaaagtacaaaaattagctgggcgtggtggtgcgcgcctgtactcccagctacttgggaggctgaggcaggagaattgcttgaacccgggaggcggaggttgcagtgagccgagattgcgccactgcactccagcctggcgacagagcgagactccatctaaaaaaaaaaaaaaaatagtctgcaaagagaacttaggaaatgcttccattaactttttcatcctagctgggtaatactgcttttaattactctgctctgagagcagccatttcttatacttggtattacacataggacatcaaacagaattggcttgaattgagcctttagggaacttccaaaggtaaagattgagtaaagattcaaatgtttattaggatataccagtgttcatttttttcccactaatattccattcaaggcaggagactaggctgatatcccatgtatctagagtggatcaagtccaatatttctttcagagttcctgttccttaaaactgtaaatgggttttatattttattccatgtttggcttaataagaaaatatttttaattgctacctggtaaaattaacatttcagaaagatctgatatgttatcctgtggctcctgcctcatacttatctaggaagttccagcacgctccttccagatgagtccggtacgctgtagtagcatccatatagaggcatgtatatggtagaggtgaaaagctggaacttgtacctgtttgaccctaaggctctggttctaatctttgggcatatctgtcttttggcttggtgtaacatctgctgcttgggacagccattgtgttagttaacatgtcagtttcatcacgaaaaaggcattacatttcagtgaaactgaaaaattattgctatatccagctgaagggaagggactgtcaaatatctcctctgttgtccaaacatggcacagtagatatagtgacagtccctttatcttctactcacccttgcgtatatatttgtgaggtgagagccatatattctcacttcctgatcttgccaaaccaggtccttccagagaatgcttgaaggtagatgggtcattttctcattcctccctctacgtgagcaaccccagaagaacactaagacctgtgttgatgacattggatgtctcacttggctctgaaattaagctgatgaaattataggatcggatattttattttattttttttcaagacagagtcttgctctgtcgcccaggctggaatgcagtggcacaacctcggctcactgcatcctccacctcccgggttcaagcagttctcctgcctcagcctccaaagtagctgggatggcaggcgcacgccacctcgcccagctaattcttatatttttagtagagatggggtttcaccatgttggccaggccggtctcgaactcctgacctcatgatctgccgaccttggcctttcaaagtgttgggattacaggcgtgagccaccacacccagtcaggatcagatattttaaagaagcatcttaacagtccttcatgccttataagttaaaattcctctcacaggaacgtaagcagagaaatcttattttctgagacaggcttcttccctctcgctgaactctaaatactgtattcccctttcactcaaaggccccagacgatgccattctcattataacataacttatggaaagctcagatctattgttggaaaaaatgcaaagtgtgtgtgttcatgcacacacgtgtttgagaaaagcctttccatttctgaaatcccaagagtcatttttatgcaagattatctgttaggaaaaaacccacttttttggtcatggtacattataatcatttctagaaaggagagcgtctaatttttgccatttttggcatgcagagatgactgacttcatagaaaccacactatcctgcttccaaaagaaaaaaaaaaaacctactgaatttacatctgaatcaacatctcttcaaagtccagtccttgcatctcaaccagcaggtccttgtgcaaagaaaatgaatgggaagtgtgatttggggttattccatttactttctgatttggggttattccatttaaaaatgaaataatgttgccattatacatctgtagtcccttctgtgttcagtgaatttgtttttaaaactctaacgtgacacctaatattacatacataagataagacatttgagatttttggtttgaacttcaagaaaaaataaaacggtgtctatttctttttgagaaaaaatttgtattttgtgcattagagaaggttgaagagccatttgttatttgtggaactcctctgtaaaggcattggatttacttatttttagattttcatgactatcccatgcctcatgtttttcccttacagaatcatccacctttgcccaagataaaattgaaatctttaacaagaggacccaggtttgagttcagctcccctgctcccagagagctttagactgtaagataattctgagatacacacaggacatttggactagcagggacttaaagactcactgttgtattacagattatggctcggaagcactgagggaaggaaagataggtgtgggtgttataattcacccgtggttttcttgccctgatgtatttatctggtactcttttgccagtctccttctcaaagacattttcttgctaaatttcttactaacttgtcaaatggagggaaaataagattgaattagtaaaacattcttatcacaatatactctaaaagaggctgggcgcggtggctcacgcctgtaatcccaacactttgggaggctggggcgggtagatcatttgagctcacaagctcgagaccagcctgggcaacatagtgaaaccctgtctctataaaaatatacaaaaattacccgggtatggtggcacgcgcctgtggtcccagctactccagaggttgaggcaagaaaatcgcttgagcccaggaggtcaaggctgcagtgagctgagattgcaccactgcactccagcctgggtgatgggagtgaaaccctgtctcaaagaaaaaaaaaaaaacaaaaaacttttgttatattgggcttatataattcaaattaataatgttacttatctatatccttagtggatttactttaatacattgaggaaaccgctttctgattagcagagagaatttgtacatatgggttcttttagaacagagggtctcaaaatacggtctagggaccccctgcggaaccccagatccataacctaaaacctatttgtatatattcatgtacttatatatgaatttatagatataacaatttttataatagtattctctaatgagtatacagtggagttttccagaagctacacaatgtatgatattgtaacagattgactgtagaagcagataggtgaatacagctgttttccagttagcaagacttaagagatttacaaaaatgtgcaggtgccactctcctcaccttctgtgactctgcatacatgccaccagccaacaaacgtacctggttaatttttttgacaagctgctctagttgaaaatacagtgattgataatccatcatcttgctgataagtagcacatatcggcaatgatgggctaattcggactaaaccgtaggagccgctgtaatgcaatgcttccctttggcttcctgccaacagttgtcagccctcctggtttgctcctgacttttactgggtttctagaagtaacaattggaaatattttatcacatatcagaaagacctcttacaataatttacctaatttagttcttcaccttaacctaccatcccaataaattttaatttcggcagggtagtaagtgtagagcagattacttcaaagtgcagaatcttgtccaaaggctgcttggttgtgtttgcactgccctgactcttgcaggtactcgagaaggtgtatctgtttcagaattcacttgccaaaacctcaactttctcccctagcaaagttgctggagtaggataaacccacagtatttggataagctcctttgaactccttgtagaaagcagtttttatgaggcagttgttctgtgttaacaccagagacaattcctagcagatttccccaaacatacttcaaacatcgataatggcaggggtgacccaaactgtatcataaaatcccagggactgcaggagacttcaaaggggagacagagcaaaacctcacttctcgttatgaggagtatgggtcacaggaatcctggctagaatccatggtaacctcgcggagtaatgccaggatggacagaggccagggctcatcagttccctagactttactaattgaccccagcagcacagttagagtggtaataactggcacctgcccacctcctgaggtgttagaggccaaattaccacatgtgaagtgcttttctatcctttagtgagaagatgcaaaccttgaagtgtgtttctatttttgtttgaactatcgagggcccagttaattcagttgagccaattctgaccttgggatattcagatccatcacttagtatgtacaggcaaattgacagtagaaatttattgagtcttgaactcctactatatttcaggcatttaataagtattaaatactgggaatatttaaataattgaggacaaactgctctgaagaatcaccaagctgtttggtttgtgtgttaatattcttaagccactcttacgtgttcattaaagcaagtttccctatagttttcttgaagaactcattttttagtgatttgacttactctttattcttgaaaacaacaaaattgcatttgtgcatatggtatgtgttgaggggggtaattacaggcattttttccctcattaccgggtccgttacagctccttgaaaacaaatagttatagttttactaattgtttataaaattagctaatgatcctttgattttttagtttttttataccttagctgtatttaataaatatttagtatcttctgtgcaattaataagaacaatgggggccaggcatggtggctcaagcctgtaatcccaggactttgggaggctgaagtgggcagatcacctgaggccagagttcaagactagcctggccaacatgatgaaatcctgtctccactaaaaatacagaaatcagctgggcatagtggcacacgcctgtagtcccagctactcaggaggctgagacatgagaatcgcttgaacctaggaggcagaggttgcagtgagccgaaatcatgccactgcactccagcctgggtgacagagtaagactctgtctcaaaaaaagaagaagaacagtgtttaaaaacctgttatttttacctgaattattttgctacgacaaatttatctttcaaattagattttatcaaagtagatatgtattcacttttttaagttgaagtctttctaaatgtctaaaaccaaaacacagtaatctcctgccctacctttccctgattcctgctccctcagaggcaatcactttcaacactttgggctgtttcttcaatgtggaggtatttacctttatatttcataaataaaccaactgctatttcttgacatcatttgacttcatgttgttatacatacatgtttcctttccccatttttcagtacagttatatgatcctttttgaataacttagtattccatttttacgttattatgactgtgtaaatagtattcccagtgaagccccccacccaggtcactttgatgatgtttcctttttaaatgttgtgctttgtttttttctccttggagttagtaactgctctttcagtattgtctgctttgttttctatatgcacattcgtaatttattctcaaatgcttatttagtttccacatttttttaaccctgggcctagtaactcgtttttctttaaaaaagaaaaaaaaaattttatgttcctattgctaatttatccacaaacactcttctgtatgtgtacaaatgcactgagtaatttattggtttctaattaaattctccctcttgatgtcctctgctcccatctgactggttgttgtctagctatttttgtctctaagctatttttctatagtagtactatagcagtactattctgagtttctttcttccatttatttgttttggtctttttctttcatgaatagagacagtccccagagaatctggtgattcttgactatctgttctactcctctttaaagatgaggcactaaaaagccaattgggagctcttggtttgaggctgagggggccttactgtggaatgatcaagtggggacctgctgactctgggctcctgttgagaggagcaaaactgaatggggatgagagaggggacctgaagctctaactgcttcccatgcagccttttaaccaatcttcctgttttcacctcactccaggcctatctgtttctcctttatgctccaggccttcagagctacttgctgcctccatctttctgaaatgcagtggaggccaccatcctaattagctttctgctttgtggcttccactccctcaaggcttacatttcagcgccacgtgtccatctgcttttcagcttctaaaatattgttgacaccttctctttatccttttggatttgtgccatttgtatccctttgctttccctttagaggggtctctggactagatctgtcatgtttaatcagaagtcctataatttagacttttcactaatttgtgtttcctttcttggtgttctttcccctttacccccaactagtggctctgaattagtgtggttttatgaaacccatatccattcagccatggttctatgtattatctcatttaggcatcacagcagcttttgcacagcatctgctcaggcagtctgtggctcttctttccccgaaagattgagaatacatctggtgagaagccgttgccagtcccagcccctgctttgagtctggtattggtctttaatctctcattctgtgtgttgtaaagaaacaggttgtggaaggctcttgtcagatcccaggaacatgaaagaaatagcacaccctacggtagtgacatggccctgtcaccacccctcattgaaccataaaagctattcagaggggccagcagctggggagcgactgtacttagatcctgggtgctgatgggtgttttgtagtttccaagggaagttgctgaaagttttcttatcttgacactccaagggcaagaggtctttcttcaaagagaagcgcttgtttcagaaaaagatgtggaaaggacgtaaaatcacaggttcttccccagttctgaaaaagaaataggaaggggcaacgtggcagtcagtgtgaaaagaaaccacgcatttgcaggaagcaagaaggggttccgcagcactggctgcttccggcatctgcagtgcgagggtaaacaggcctactggggagtcggttggccctgggtttgagtcattgggctgctgcttggctgtgacctggaacaagtttttcccctcttaatctctctgagatgagattcctttgagtcatatgcctacctcggtgggtggttacgtggattaaattatatcatgtatataaagcactcagcctggcatgtggcatgcaggtagggctcaagaaatggtgtcagtgtgaatattctcccctgaatgttggaatgttgtgtgaaggtgaaacagggattgtgtccctagctcttacttaaattcaaccctgtccccgaattcttgctgaccacctgctagagtgtgaggactaggagttcatgtgcttggctgggcttttgtccttcccattctctttcttcacacaaaatgaacagttgaactcaggccaccaaacctggttgagttgctgggtggagggactctcctgggctctgagcctttgtgtgtgggaaccgcactggaaaaggtgtgcagaggccacgaacttgctctgaacccacttgtgaagagcaggtgaccccaaactattgttagtgtctgctgtaaatgatatgcctctgggttcgagcagagttcagccaaaagccccacatgacatggaaatctgtcctggagccaggtttgtcgggtaaaagttatgtagcaaatgtctccaaacattggcatctgttgtctgccgagactaggacaaccgagaatgatggagtgcttaaggaaattaggatggggcatgcgaccctgtaacagctgataaactgtttcaggccaccgtggctcatccagctcttttgataaacagctttaaaagcattacgtggtttggaaagcattcttcaaaaatggttatattttccagacgcatgacagtccactgttcagtattatttaagggttttaaattgtagaatcagattccttttcagtggggctcttggaactgtcgagggctgatctgtctgactcccaccaggacaatctcacaacaatattattatgtaggtcggggtcccctaggtctgttaaaaaaaaaaaagttcagggctaagcgtttaagaggaaaaactatttctttcatttctagctaagtctgatgggccctttcaaacactgctttcatcatgcaccttttatttcacgatttctgcataatgaaaatacaagatcgataactgtggattatcgtaatgccttgagcctttgaaaatgaacattttctagattataaatgttccctttgtaattcatttcaaacttcatcctcccatttgtcctaattcccgaaatttaactgttgccttttgagcctcctaggaaattctgggtatcctttaggcaagggaggtagctcttgggggaatagcattcaggccacaggcaattcatttgcgacttgggctcttcttagaacatatgataagtacaacgcactgtagtgacagattttttaaaaaccctattaaagcccaatatactaatgcagattttttttttttaagttttagagagattcatgggattttattctttttcccaaaggcagtggtggagctgacagagtagcatggagcctcgtcctgatgtattgtgcggaagtggcagcagttcacattcattcagtttgtcagcataggatcagttccttcttgactcaactctctgtgatcaaaataagctattggatgttccctttgggtactggaagcagcttggccccttggcaagagaacaggattgcaaatcacaagagcagagccctgactccagctctgatgctactgtgctttgtgaccttgtgcagacagctttatatccccatctcaggtcattctcccccatacaaagggggagagggtcatccttgccctggtcatgtctgcatggctgaggtgaataactagttgtgtaacttcctggaggagtggcacagaggaagctcccttcctagggctggctctgccatcagggaggaagctggatattagaatgaagaaaaagcccatgcagaatatatggcagcccgataatggattctaaaaataaaaaagcactaggttaatctgcagctgtagtgtacctaaagtattctttggcaggttgtggccctagcctaatccccagctggacttagcaccatttaagtgagttacatctcatccccgcaagggattgagtctgtagccaatttggccttgtcaccacttcagccctccctctgatttcacctttgggaaaactacaaagtggccccagacatacatagcaggcttgatcacatgggtggagtctgtcaggacagcatacatcaaataaaatgtccagggaacctgttgtaaataaaccacttcccgcatgctcagtcatcgtggaggtacttgaatgtttagtttcttttagctgatggccaagaaatcaatgtttaaaaaaaaaaaaacaaaaaacaaaaaaacaccttgacagaggcattttgtacaagaatggtgtgtgggtgtgaaaaagtaaattccaaaacatatttccttttagttcccaaacccatattagatgagtacttcttagccttggccacagtgctagagtaaatagcagtgtcacatagctcgtggaacaggcaaaccacagaatgtacaagagagaagcgtgcacaccagtgagtctgctatggcagctctctttgtcctggtttctacatctcatttgtaagcaacttgtgttcctgcattttcagagtttggccagtttatttacttagaattgcatgttcctggaatattgtcataaaagtgatcctgagatagaaaaagtcaacaggaagcaggggcattgagtttataagttctcagtctgtcttggcccatattaaagtctcattctcaggggtaggtccagctttccaaattttaatatatcagagactcctgatgcatctgggctcatgatgggccaaagtaggccttcaggagtcctcgtgttacacactcaacgcctaatggagactggattcatttacgtgtattaatgtaacctgcgtgatcatgtgagtgcaagtgctttgtagattgtcctgggagatgtggcatattatgactaaagacttaattgaaccctgaacatgtatatgaataactggagacagattgactggattacacatttttcttgaaaatttcctaaatttagcctacctctttgttgccttttatttcccagcttaagtggttctctataacactatattttaaacaaaccagaacaaatagtatacaaaagcatagacaagagggatataacaagagatggttttctgtgatccgtggcacctcctctctaccctgcctccaccaccaaaaggggctttaaattaagattcggaatggcaaattcacttaccagctccaaacacagtagacaaggaaaccttgtgaggaaaatccgagagtatatttacagtttctgttcagaaatacatagcttaacttcgaaggaggaagcgtgacttttcacctgcagatagaactagggtctgatttgaaacagaccactggcttcactgaaccccatcaaagaagtctgcttctgcccggaattggaaagtgccagtgggcatgtagttgctagtatgggatttctgtttttatttttaacaagcttgggcccaactcttagtatcaagatgggtgaagacaaaactgaccagaaaaacacgtatcaagtcagcagtggctcacccctcagaggccatttttcccacctgctcctcttatacctttggtttgtttttggttttggattttttctctatgttcctcctactctttctttctctattttgcttgggccttcgttagaagagttctagtaatcatttcagacttccaaaattcaacccagtagcctcattttacaggtggacccactaatacacaacagctcgatgtgacaaaccatagactcacagttaatcacttggagagcctggattcacctccgcgatgacctgcctttccagccctccagtggcgtcctctgtagtgagttgtaaatgtgccactctagaacattccaggaaagccctcctcttgggctaaactctaaaactaaaatgaagtcctgcccatgtgagctgcttgtttaacactttggatgctaatcagagcattaatgagaacacatggatagattcggcaggtctaatgcttgggaccttctcctatttgattccataagactaaatcccctataaacacttccctcctgtgcacacacacatgcattcacatacagcactcacgtatccctcccttatagccaaagaccgaaaaataaattttttttttctacattaaaaataagaccagctagtaaccagggttggcattcccatctcctgtggaacctggaaggactagcagatagctatagagatctgtctcctttttagtgtggttgtattaagggcaatcttgcctcccatggcaccccagaaaatccaggagttcaagtgggggtgcactgtaggaggactcagcagctgttttatggaaggttcgtcagggatcagactgaagattttgcttttgtgagaacaaagtgaaatgtgacattcaggagcagctcggggcctatatataggggcccagggcctgctgggatggggttttacacttgggctgtccttttgcccttcccctgaactcttttcacttcagtcatgagcaaacagtcagtgcctgaactaacaaccctgtagtcctccgaagcacggctggcttacagtaccgaacaaagggagggagtgccgcgtgggccggcccaggccgaggaatgcggcttcagggttctgctccataaatttaaccagcacgacgaaaaggagataatatgagccttcgtgatgatctgaaagggggaggttctgtgtcccattgattgcggtctggcccaatgccaggcccaagcctgaccgacagttgaaccatatcattaaggcgtgtaatacagctcgagtcttgtactgccgccaatgagtgcatatccacagggcaaaagtttataaagagtcgaggctgtcctgtttaaccctctcacactgcatgtaatagaaccagctgccattcagaacttgcccatctgaggtcataaaggaaagcctgcacgtttcttttcttcaaacagcttttcaggactggggagaggaagaaacgctgtctagagagggtcaaggcacggtgatgtttctctctggagaagcaaagcagtctgcctccctccccccggccagaaacgggacaccttagtgctttcttcagagtagctctctgtttgtggtataatgttgctggaggaaacagggctgacaccacaggaaacctgcctgtctccaaggaggccgcatcggtggcagaggtgggtcagatgccggccgtggagtgctcttgtcaagcttgggatgatgccgttttccttccccatcacctcgaaagctgttaatagccttgctttctggccttccacagctacgcccaggtgctaaaacagagcaggtggaaggccgccccacggagtggcctgtgagcccagagttctcactgtccgaggccggtggccccatgggaactctgtccattcaatagggagggcatgtagaaataggcacattgtcacagcaaggcctggagtggcctgggttcttacagtgggcactgcattgaggaaatgggcagacaaacaaggatttagcataagtatagtcagaaagaaagggctgcctgtgttcaaaggacaaaaggaagaaagtgggcgaaggggtagtttagtcctgtccatcagccagtcacgttctttggccaaactcgggacctgcctgtgctttgtccatggtgtccaggaagaaatctgtgtctgtcacttccagattgctgcttgtctgcaatggacaatgcctcttaggcagacacctgctcgggatgacagtgctgcagaaattgatccaaaacattgactagcttgcatggtatcgctgtcattagtattcagtcttcacaaccaccctatgaggtgggtgctatactttccccattgtacagatgggaaagttgaggcacacaggggatacgtaacttgtctaagatctcagaggtagtaaggaagggtaccagaatgtggaccctggccaactgaacacagagtacatgctcctaatctctgtgctgcttctgggccatctctcggtccctcacatcgaaagacctcatgatttcaatccaaagcatctgaccaagtgttaggtctacttcctttcgattcttggatatgaagggtaggagcttaatatctgcctatagcccagaagatttgtgcaaagaccctggttcacttggagaggaggtactataaaatttggaccccacaatgcgaatgaagggtatgtattgaattccctcagcccaccagcttaacacagagacagtgtgagggatatactatagctgggaagcttggaagggctcatgttcaagggcctctttgggccaaacagcagtgggcctgagcatggagagaccctggccttttagtgccagtgcctagagaagcaggtcactaagctttgtgcccaggagctgtgctgtccctggtccatccctgtgtaccccattccactcctgaaataatgaactactgcagccttccaagttcacagtgtgccagtttgtcacagaatagcagtgacacttctctgctgcaacccatctttgctctgccatgctgccaagaccatcttcaccaggcggtaacctgggaactccagctggtacacagtacaagaagcctccgcagtagactgtcccaggtgcatgtgctcagtatgtcatagccatctccttttggaggccagggagagcttctgtttgggtgccacggatcctggacagaagctttctagaggtaggagaagagactaaatggctggccaacccagagattgttggattgtgttatgattccatggtcaaagtgctttaaaaacctagaaattggctctggtagtgagtcccaggatggagctaacttacgatctggactccattacatgattgctaatcctgaagttcagcaaacgttggtactggctgacttttaatggagtacctgtttgagggttctcctcatcatgtatttaaggttaaattgtataaaggaattctgctgctcttttgaaattttctggttctgtttaaccatacctaaaaatgccatgaggtagccagatgattgactaactgggatttatggaaattcttatctgcaaaaatctcaagacaaagagggcactaactagaaggttcccagtgctttatgtaacatgcagaaggaagtctggtctcagcttcttggatctgagcaatcctttggaaagggagcaatgaagagcagtaactgaagactcatttcctgccttctgtgtgactcactctcctttgtcaacttcaagtttgccctaggcctgcttgcttctctccaccccaaggaacttggtctttggaagacacaggcacctgccctctctgtctgccttttgcccccaggtccagagggagaaacaaaccctcagttggaggaaagtctagagcacaggctttgtgttgctcagagaagcatgacaggaagtggtgctgttgcctctgcattggccgactcctggctgcacctgcttttcccagaggcacggggaggcccaggcaggggcccagggcctgctgctgatcagtttgtcctgcttgcaagtctgcatcccagtacccaacggggccaagtagaaaaggcacatagtgtagtgtgagccgtagctgtcaccagatgggtctttcccctccgtgcccaaccccttccctgacctgaaagggcctagcctctttccccactggcttccaccaagttctaacacattttatatatatcgatttccaggcttgtagaggcaagacctacagtccaggagttcaaatggattcagtgttgttggttcttgtttcctagaaggacaagtgctctgaaggtttggtgtcaactctgacccaaggggtgtatctgatttttatgaaggcacagaaatgcacctgaggtgaccccaagtccttctcttttattttttgatttcccaccacctggatcattaattctgctttcaagggggatggggaaaggagaacatttcaaagcaaagttgatttggtctctgaaccagcttgtcttctaggctgtagttcaccctgatgagaatcagaaaggacagtctgtaaaccccttcactctagtgactctgcagctggggagcctcaaaaccagttccagatgttctctctccctatattggccagaagggaatttcgggcaagcaaggaggcagagagcttttgcccattcattgagtacccctgtctgcaaactgtgtcttgcttcatggcactttagggagagtgctgagcacctgggtccatttgggaccagccagcccttcctgttcctcggttagaggcatgctgctccaagctggctggttactgcaagcaagagaagcccgccttcctgctgttcagggtcagaaagcaagaccgtgctggagaagtaagtcaggcaggctaggaaggagacctgcagatgacccttgggttaacaaagcaactttcacggccctgttcaccaccagctaggatagtacagggctttgcctcccaatcttgggagacgaggcatagatagtaatggtcaactgatggccctttactcttgagaaactccacccagcctccccttatccagaagaaagccattcctgactaagcctggccattctgacgccttctttcttagtctgcacccagcctgtgctgtatgcggtatatgatggtagaaatttgcactcttcatgctttgattttaaatgcatattagacattttggcatttgtgcctgaatgctctctgtatcatcttttttaaaacatagtttgattatgtaagttaaagaatgtacaaatgtaaacttctgaaaatacatacaatatatgatttcttagagtgtatggacactgctccagaggccttgcatgaattatctctttaatccttacaaaacgaatgtgatgggtactattattcccacttcaaagaagaaaataaaaaggacttattctccctgggcattgacaagcaaagagattaataatggtaaccccaccagacatctctatgggtatatatgtgtatatacactagtatacatatatgtatacatagtatacatatatgtatacatagtatacatatatatatactagtatatatatatgatttgacatgaatgggagtacatatgttgatgtctaatctttttcactccacaatggtgctagaacgtctttccattccaaaaatcatttttaacatttacataatattataatacaaatattccataagctacttaactagttccccattgatggatgtttttaatttgttgctgttgtaagcatcctctacatatatcccatcttacttgaataattctctccttaggctaaagtcctaaaactatgattgctggatttaagggtgtgtatattttctgctttgaaacacattgtgaattgccttctagggagttgaaacaatttgtactcccacccacagtgtgtgagaggactgactcctccagccgtgtaccagctctggctattcattcattcagaattcagtcaagaattacatgaagtagctgcagtgtgccagatactgtactcagaaccaggcattgttactcttttaagtctttgccaatctgaaagagtgagtatctgtgttactacttgcatttctttgagaattagaagcgttgaaacatcttttcgtgtttcagttggccatttggatttttcttcttttgtgaattacattgcgtattctttgcttcaatctttttaaacccgttaaggtcagaatttgtctttttagtgtgtggtttttttttaattcttatctagtgttggtctaacccttccaacagttgtcatttagccagtttgtcatccatgtaagtacatatctttcttccagatattaacaaagtttatatcagtctcttggtgaattccgttcctgtaagttagaatctgcatcatgactttataaaagaccatcactgtgcctacagttctttaggaatcgctttggcattaagaatgaggcttcagccaggcacggtggctcacgcctgtaatcccagcactttgggaggccgaggtgggcggatcacgaggtcaggagttcgagaccagcctgaccaacatggtgaaaccccgtctctactaaaaatacaaaaattacctgggtgtggtggcgcacccctgtaatcccagctactcaggaggctgaggcaggagaatcacttgaacccgggatgtggaggttgcagtgagccgagatggtgccactgcactccagctgggcaacagagtgggactccctctcaaaaaaaaaaaaataaaaataagaatgaggcttcagccagatgtttttggattatatgtggcgtggcctattacatggtttttatttttgtttcctcctatttcttagtatttctttccaccagttcctgttgtaaaacgtgaccagttggtactgatgctgtacatccttgtattagtaaaaatcctgctgtgcctggaggcagggacctgcttgggccaggccttcccaggaagcccgtcctaccctctgtagcatatagtgccggaccaccccagcgctcccacttacctccttcactctttcattgttgatacatgggctaggtttcctacagagtcacttcaaggatgtagatcttatcctcccaattggattgtgagtttgttgttattgccttttttggtattcctcaaggatgttcagaatacctcacatagtgatggactcagagtacctattaaagagattttcattaaaatcacaccattcagtaagttgaccaagtacatcaagagagtcagaaagacccaagatctagtttggctttgccaggcatagcttcctcatccataaaatgaaatactagtaagatacttccttatgtgaatcttgggaggctcggagtgtccagtacacattcagcactcagtcagtgcagctgtagagacatagcgtggaccttggtggcccagcagtctcaatcctggtttcttctgacctaagattggtgggaaagtacagataaaagctggttgaggaggtgttgatagcacagagtgtttttacggagtgtcctcggagggttacatgctcctttttgttgaatccgaatctttttttttttctaatatggagcctcataatcattcaaggactcagtgtgatgccacaggtttcaaacttgccagttcgtctcttatgttctgccaattttttaaaagtgggaatatgagtgcatgtgcacgtgtacacacacgtgtgtgtgtgtgtgtctttgtgtatgtaaaatgcttgggataaaaaaagatggatcaaattttgtctggcatggcatagcaactctcacctctagtatcctctaaacatttaaccaaatggactttaactggtttacttcaattctatttttattttcgtagtcatttaaatgtatggggagccaactctttcaaatgagacattttgtcattaaaacatgttatttagtttaaccgcatgggcccggcttcagcaacattgaggactgtgaagagggttctgagcggctgttctctcctgacctgaccgcagcagtgacccaccagcttgcaatgcacgcaaactgaaacaggcaggatggccagcccagggttgtctgcacggtggtcttggcatctgtaccttaggttgccagctcctggccctccttgcctgcatttggtggcccttggccctgccgtgtcatatggcacaagagcccttctggcccgcatcaccctgtgtactgattaggcaggaatcagcaaatccgttgagtgcatgtttaatgtgacacagatgtgggacatactacagatctttctgctttacaaattttcagctttttgcatttcatcagtgttgcttattatttacagaatgtaacttgagacatcagaacagattgtaatttttaaaaaggttgttgggggggtgggcccgcaggggatctgggagaaaaaatccagtagtgtggaatgttgtttgctgtccagaccaaacaaaccagtttgccaagggttgatggactatgacaatcagtccaattcatgttaacactgggggcacttaattaaaaggcagcttgacctccttatcaccaaataaagaataatcttttgttaccaggttgaccgtcgcagcaccaggcagaaatgtaccccttgtagaggcactgaagggtaccaccaagctgccagctcgtgtcctgcctccttcctgtccacagagaaaggcaccattgaacccagtccccactcagacatgtggatattcttgcctcatgcctgctgtggctttacacccaggcgctatggcaagaggcggaaaaaagaaatctcttcctttgcccaaaaatccaagatactcttgagggcattggaatgatgagccaggccagtttgacacaagttcaaggagaaggtaccatctcttgcttctagaggggcacatctggctagaggtggccctggcttctgagaaagctcagccataggttacatttaagggcaaacaatgaaaagcaccagctggtcgggaggaagatgaggaggagtgggtgattggttgcttctttcctgtgtctagttctaaagaacttaaaacttgggtccaaaataatgagagccgtgttgtaaaaatcatttgaagagagttctcctggggaatgtgagctagtgccgtgacctgatcccttggtcagatggttctgagctgtttaagtgctgagtgtcaactgtctacagggagccaggcccctgaggagcggccagggttccaagccccactgttcttttccttcctggaaaagtgcagacggtgcacgttccccggaggccaccaggcagctctccagttgccctctgggtgaacgtgacccaggtcggtaactttctagtgtcccccccacgttggaatgatcagcattcctgtactccaggggttcttgagttcttgagttgttaccaacgccctgcctttctctggctcagattcagaggaggagttccactgcggactgccgcttcttcaccctctgggcttcggaagcagcacctctggctcccctgcacccagtcctcagtcttgtggccctggtctgcccctttatcacatgtcttgagcaccctctcagcacacagcaccgttctgagcgctgaggtgcgaccatgcatagaagagacaagaatccctggttccgcatggcttccctcaacacctacgtttccaggccatggcttgggttcagaagaatcaccctccctggaagagatgagtgactggaaggagagcatgtcactggctcccctgagaccctcccaagagcctcagtttctccctctaccacctgaagtctaactgcagggcctgaaacagattctctttaaaaacccatgagtgtggtgactgcataggttttcattctcctgagttcttaatttccgtgtccctagcactttttgaagcatctgctcctgttgcccctttcttttcctcctcaccctcctccatagtctctgtttgatagtagaaggagatttaaaacctccaggctgagtgaacaggcggtcttgaaaaagcaaacaaatcgggtcaggcacggtggctcacgcctgtaatccccagcactttgggaggccgaggtgggcggatcacaaggtcaggagttcgagaccagcctggccaatatggtgaaaccccgtctctactaaaaatacaaaaaaattagccgggcatggtgccgtatacctgtaatcccagctacttgggaggctgaggcaggagaattgcttgaacccaggaggtggaggttgcagtgagccgagatcacaccactacactgcagcctgggcgacagagcgagattccatctcaaaaaaaaaaaaaaagcaaacaaatcacaaagcaggtcccctctgggggctggagcatcctcatatctgcttggctttggtcactgaaagaggccctgggggagggggcttcagggcttcccaggggagaggtgacagttaggacacacgcctcccccacttcagtcaaggcagcttcattgtcagcggttgtacgtactaagattgtgttacaaacttcatttgcagaaagtgttttacccctgaaatttttttttgaaagcgcctgctgtgagttttattaatggcacttttctaaaacttcattaatttcaattatgagaatttgatatctggtgtaattcattgagctgctagtttgatttgctctagctcgttttaaaaagctctgtcaggcaacaggatatggatgggagtgggtcaggtgagtgaaaacgttttaagcactcctttcttcagaaaacacctctgtacccacatggggtgtgctcctcaggagtcattcagacaggtccaggagaacttgtcccccagggtgctccgtccagatacaattttaaatactgcactttcgcattttggtattttcaatggacttgacacccaataattctgaataaaggtaggaaagagggagatgattaacttttacaagtacctactatgtgccaggcactatgctacacattcttcatattttatctcaacattatcaaccaagtaggtattaagttctcacctattgatgaggaatctgaggctaagaacaatctagtaacttcttcagtgtcacccagctaataagtgactgggatttcagcctgtgtttgtctttttccagtctatgtttgttcctttatactactttgttcttaaatttcatctcttctcttaaaagaggtcaactttgggagaaggtagataatatataaacattgaaagaaaaagattatataatcatttgccagaaataaatctgaaaatattgggctggacacggtggcccacacctgcaatcccagcactttcagaggctaaggcaggaaaatcatttgaaccaaaaaaaaaaaaaaaaaaaaaagtagtgaaaatgtatggtttattaatgtaatcagcttgttattattagcatgcgtacttaatagccacaaaataaagcttaccagagatggtgtatttcggtccttgtgaaatatcttgggattggcattagaggtgacaggttagcaaggaatttgataatggcttgagagattccaataagcactacactctctgactcagaatgttctacttagaacacaaagaaagcttacaattgtaaagcgccttgttcttccatgatgttgaaagttgcaaaccactttataggttgtctactattttgtaaaagcaaagcaaacccagaatgcatgcaaaaattatggcctttaaagaaatccaagccttttaggctccattcttactataacatgatctattttcttggaattctttataaagtaactctgcccctccccacccagccattaacaggtagtctcgcccctgaggcagttgactaagaaaaaaaatctggagtatttttgtcttagagtttaaatcccaataggtgtatctgttggcattagtcctaccagctgtcacagttgcagtgtcatggggtccccaaaacatgtgttaaattatgggaagccttgacccctataaacaagtcaggtgtgaatcccactgatgggagaaaacccagcccaggaaatgtcatccctgctgctggatgtcaaattgctaaaaacttaacaatatcaatataatttctaatgatttcttgaatcaacatctttcttacattttcaatggcaatagtacaacatgggattttatgtgtgttatgcatgtatgacttgagaactctagggagaggtaagtagaatgttaacaagaaagcaaaggggaaaggaaaatacttcagtttgaagcagtgagcctccccagtaggaaaactaagtacaagaggttggatgttacaccctagcccatcttagatcccagacacctcaactagggttcctcgtgtgcacccatggcactctaaataatacactaataaaaagaataggtagcattttatcgagtgcctattatgtgctagactctgttctaagcactgtacatgtattgacttatctactcctcacaacaacccatcattacccccactttatagatgagaaaaccatcgctccaagaagtcacataatttgcctgtggttacagttcgtaagtggtggagctgggattcaaacccactgggcaggctggctccagagccgatcctctcagccattatattatgctgcctactctagtgctccctgtctctcctactgcttccctgctgtgttcttgttgccatttctgttcatctcctccactgaattgctgtaagctccctggatacttaattcatcccagtcttcttcaggacctagtgctggcctctgcatatgatagtttgggaaaggttggttgaataggggactggaggaggcaggcacaaaccatttgcagggctctaagtaggctcgtttttctggctaccctagtttggatccttagtcagtaattccatttaagaaccaatctctactagcatagggtttctttctgcccaacctattttccatgtgtccaaaatccaaattgtcccaacctacggattgaatactatctttgagtgggttctagaaggtgtatttctctttctcttgaaaccttggggaagaatttctcatgtaaacagaggcaaactttagaaattttcatcctctaatagagtcttctctgattacagtttgcactgaaaggagtaaaatctgtttatggagaagaaatgcttttccacttcgtctttagaagtagatgcatgtggccaagaggagggagctacacgtcagaggtagttgcagcctatggcatgatgggagctacaggtccgagatagatgcagcccacagcatggtgggagctacagatctgagatagatgcagcccatggcatggtgggagctacaggtctgagatagatgcagcccacggcctggtgggagctacaggtccaagatagatgaagcccacggcatggtgggagctacaggtccgagatagatgcagcccacggcatggtgggagctacaggtccaagacagatgcagcccatggcatggtgggagctacaggtccaagacagatgcagcccacggcatggtgggcttcttgggcttgcagacattgtactgctgtggataccagagggtttttcaccaattcgtctactctactgcagacagtactatttagacagactgcggggtttctcttagagaaatgacaaatgtttgattaggccatttggtcaagaaccctggtatcttgtagctgttatcagtgaccagtattggaagaggtagtctggattgaccttcgttctcagtctaattgtgcacactcgagcacagtatatatcagtaagatacttgattaaaacaaaagccctggacacatacataaagtgaatgcaagcacaacccatcacacaacccttaaggaagatggcagccatcagttgaataaacattctatgatgctaacgtcacatgtgtgacatacactttctactcacttactgattgtttttgaacatcacttggctgatagacattggccatgacagacttctcaaccaaattaagctgtgtaggggtatgtgtatgtgtgcacagcatctgtcttaactaacagacctatgacatagttactcatcgtataagctacgaataattaatgcctggctaaatgttgactttcaggctgaaaggcaagatcaaccaagtggaattggctggatctccctgtgtcaccttgtttggatttactgttgattttttttttaaaagacatgagttgttactactctgatcattggttttgggcctccggtgtatatcagatagcaatggccagatgcaggcacactctgtattgattgccctcactggaaggatatctgcagtgtatcagccactgtatccacagccccttccctgggggaagagtcctccatgctgtacagcagactccctgacattttcatagagttcaaagctcaagttggtttggtgctgacattctggattagctggttgactggaaggactgcttctttctatacactgtgaaatttgtaaaccgcagcagctgagggcttaacatggccgacaagctccagctggcagcaattaaatataccgcagacctttggccaaacaaaggtttgtggaggcagagttgctgcatgtgcgctgaacagactcctaggttgagtgttggttcataagagatgctgtcgactaaggagaggtgagtgggtggattttggccacctcttgttcggtgatccattgtccccagaattattgtatcaagaccctgcccaagtagcagcaaaggtggtcagaggaaaggaacaaagccaccagggaggccgcaggcctaacagtggtgggcctgagtcgtttagacgttgatctgctgctgtagcaccaatggcaggatctgcagctactccacttttttaaatttattaatttatgtatttattgggtaccactatgctgtaggctataggctgaaaggagaagatgggaatgaaaaaacaataagaagacatttaatatccattcaagcagcaaagattcaagagtctagaccagtgctatccaaaatacaatttaaatttaaaattcagtcctttagttacactggccacatttcacatgctcagtagccacacgtggtcagtagctatgtattggacagtgctgtcctagacaataccaagtgttggatatagatcgctagggccccttaaatgcctcattggcaggaatgtaaaaatggttcagccacttcgaacgcagtttggattatcttgttaagtgaacgtttatatcttgtgagccagcaaattccccctagatagattctcaaagttcaccaggaaacacgtacaggaatgttcataatagcatcatttgtaatagcagaacctggaagaaacccatgtgccatcaacaggaagatggatatatcatgggatagtcatacaatggaatatgaacaaagcagagacatggtgaattaatcatggctacacacaaaagaatacctgaatcttagcaatgtgacagcgacatcctttttcaaaagcccaaaactaaacccaaagaacataacaagaatgtactggagcatcctttgaaatgtggtaaggctacataaaaaagaaaagcacaggaatgagaaacacaagattcagaacagcggctgccttagttaaaggaggaacagggatttggggtggcagaagaccaacttgtggtccacgattgagtgatggagtttttttttttttgctttcacagatgtttatttcaaataaataaagagagcccaatgatgagagtgggccttgaactgaggataataagcccagtcctaaagaccagttattaaaaaaaaaaaaaaaaaaggactggccgggtgcggtggctcacgcctgtaatgccagcactttgggaggccgaggcgggtggatcacgaggtcaggagaccatcgtggctaacacggtgaaaccccgtctctaataaaaatataaaaaaattagctgggcatggtggcgggcgcctctaatcccagctactcgggaggctgaggcaggagaatggcatgaacctgggaggcagagcttgcagtgagccaagattgcaccattgcactccagcctgggtgacagagcgagactccatctcaaaaaaaaaaaaaaaaaaagactagagtcctttccctccaggtgctcataggcttactggaacatacaggaaagtcacttaaaaatggacacactgtcactgagcatgaacaaatgtaggactgctgttacatggtcatactcgtttaaaaggcctacttgaacgtacagtgtcacatcaacagatgaagaaaacagcgtcgtcacacagtggcctgggctgaagaacttcactttaaactttttgctggcttacgaggtttgaaaacactagcttactgttagctttttacattattttagtaattctttaagattggaactaaatttgttcatatgcagtgacttcaaatactctccccctacccacagcctaccaacttggacctgagaaggtaaatttttagttgagttttagagaagaaagaagagtttttcaggcactgacattgatgaggtgatacaggagtggggggaaaattcctttaatccagctttctgcttctaggaagagtatgccttctggaagtccttgtattcataagactgtaacagaagatgtttccttttagggtaaaattgaactcatctgtcttttcttccatgttgatgtgaaaaattagccttgaatgccacagtgagctcccctagtcagcagtgttgagcactgaatccaaccttgcccttgatattatttgatcaaaagtcaagaaccctggaaatgggaagatagtttgtggcctgttgtgaagacagtcaagaaaagaaacataatgatagtcagtgtgtatcctcaggggagccactctgcttttgtattctctgatgttttggtgggtttgcagtttacaggttaaaaaataatgtattgggagtgggggtgaggttggatcactgaaacctgggtaaggctctgagggagtccactgagtcaggaaataactgtttacactagaaagctgtttgatcgtgtgagaagatcaacaaggtgagccctttactcccattctcaactattctggagctgtcatgagattaaatttttaagagctcgggtccagaaacaagccatctttcgttggcttctctggcttcctcggatccaccagaggcatttaggacttcagcaagttttctcctgcctggtagcatgttttccctcagctttgagtactaatgaaaatcctgcttcatgtaagggaaaggcctgtcatcagtgtccgcttcaggacactgccgtcatgtccctttctgtgttttgatcagtggggcagacagagacagccttgtcctttctgtcaggaagatggggttctagctgcttcatattttgcctcaatgttgattttgctttcagggctcaaaatccttagtcttcaaactctccaccaaagcttgcatactggccttcctgtttagctcaattaatggcccttataccgtctgccagccaccaggcactcactcgtttattcggcttatcctgactgctgctctaccataaaccagacactgttctccatcccaggaatgcagtgaatgaaacaaattccccctctcctggagcttccagtccacatgggagccaagcagtaaataacatgtttatccacctgggatggaaagcaaatgtgctttgagcagatgactgacttgatgtaacttaccttttttttttttttttttgagacagagtcttgctctgtcgcccaggctggagtgcagtggcaggatctcggctcactgcaagctccgcctcccaggttcatgccattctcctgcctcagcctcctgaatagctgggactacaggcgcccgccactcccccgcccaccccagctaattttttgtatttttagtagtatttttagtttcaccgtgttagccaggatgatcttgatctcctgaccctgtgatccatccgcctcggcctcccaaagtgctgggattacaggcgtgagccactgcgcccggccgatgtaacatcttttgaaagggccattctcattgccatgaggagagtggacaaggatggaaggaaagagaacaaattatgagactactgtaataatatattacaaatccagggatcctttgttagttatgatcgagatggagaaatagtcagatttgggatatatattgaatttgagcctgcaggcctcccagttgattggggaagatatgttgagacgagtctgaatcaaaccttacgttgaaagtgatgaggaagcagaccctgccatattcctcttggagagcctttgggcttctaccatgtagcctgacagagaggtcagcaggactgccctggggaaaggatactttattagcctgtgtaggcagttattggaatgacagcaagtgctttgctaggcaaggagataagaacagagctctgctacgtggagaggcacgccaagctccttcccccaaccccgctgcctgcagaggttaccagcatcctctcggcagcagtcgtccagcttctctcctgatgggttagcagcggcccctctaccgccctccccactttcgatcgatatttgggctctgagtagccaactgtaagcctgcgtcttgaaggaaaaattgagactggcggggtatgtgagtgtgtgatataaacacaatgggttttttactctttcccttagtgcagatcattgaaacttctataaagtctctgtaatacccttagagagtacaattaatagtactgaagacgtccttataactgaacttttgtaaaattattgctggatttttgtctttccagcacacattaaacctcaccaaggtatggggctgtccttcagatgtcacagcctgatgaactgagtgctgacctggctttgggagcacttttcagttatcccagctgtgcatggcccattgcatggcctgtgacaattttctggggttgtttctgtccatatttccaacctgacttgcccaccagggcactttctgcccttgtaagtaaatctctatgctgcttactgttagttcctgtttctgaagtgctgattcgatgtgtaaggcttctcctctcttttagatctgtctagagaggagtgttttgcttcagtgagctccaggaacaaataataagtacagcaagtacaaggccgaggacagacccagtgcactcttatcagtcatctgaaatatgcacagcctttccaagacaaatgtgcactcctgtttctaggaaaacaccagaaagtacttaccaattaccctgtatatgctgtgtggaaaaagacaacatcagcctaccctgaaagccataacaaagcagattcctccgggccgccgacagctgagtggcccgagttagagcctctgcagaatcccagcctgtggcctgggccaggtccaggtccaggtccaggtccaggtccaggtccaggtccagggggcattcttcccctcgcatgattaccacgtccctcaccctttgcccaaggaactgacctcatcttagaagaagtctcaagggttggtgtgttcttactaagtgcccaggattttcttccagacccatcacaaatccaaagatggctctcctgaagagaggcctaaaaaagagggtgcggcccagggggatctattatagtaataaccgcaggaacgagagccgccgctggtgggcagctcaccatccgccaggagcaggcttggcgggcactgttttatttggtcttcacagcagtcctctaaggtaggtgtcatcgtcctgtttcagagagaaaacggaaactgagggttaaggaaggtaaccaacttatccatgatcacatggccagaaaatggtagaggcaggattcaaagtcaaatgagggtctttaaccgctatttcatggtgtattcacaggcagtactgtaggttaattctgttcactaaatgtaaagtatgtctcgtattacagagtgcttttgtcttagtgagaaaggaaaatcattttaacctgcacacttaacctcttggctttatgtccatttacccatctaggactcaagcacagagggttcggaaaccgcgttgctgcacggggccccaggggctgcttccccgatattctgagagccaggcggaaggacaggagcagctcttcaaactcacagacaacatacaggacgaattgtaagttagagcatgggaaaccagccctgtgggtctactgagttgcctcttcttttgatcctgagaagtctccatctgatctgagttattttcatgactcttggaccttagatctggtcaaagaattccttgccccaaatgttttttagatttagatataactgatgctaaacagccttttactcaaagcagtggttctcaactgtgtgccatagcctggccttagtgttttgtttctagaaaatgacagtctctttctagttagttcaaagagagaagatcatgaataaaatgttctcaattttaaggtttttctcctgtaaaaatttcttaaagtttgatatcccatttttgccgcagaatgctagcaaaacaaaacagaaaaacaaatagcaaacaactaatagttggacattttggaaatgtatttttcgtaagattgcttcgttactctttaaatatggagccttatataccttgtcatatcttcagttagtgatattattcctagttgacacggtagagttaagtatttcactattttaggatattttgcagagatccttgtagcatgaaagtgctctataacctgaataggtgttagaaccaccagcccacagaaagcagttagttgtgtctgggagtagcaaaatactagattaatttcttctgatgcttatttgccatctcctttaaggtaaagcgagcgtgggggattctgagtgctgtgggtgtttttcggtgggtggaggaatgtctgaaatagacgtcaactgtcaggatagtcttcagagtcattgttagggacagtgttaagtagatctcatctcatagtttcatggtagtatttgaatggggatatcaaaagccaactccagaaggtatttgttgcttgccggatagaatggcatcttcctacatgtgccttgtgtgacccctgtggtgttattagaaggtctcttgaagatggagttgtactttcttgtttcgtctacttgggttgccattataaaatatgataggctgggcagcttaagcaacagaaatttgtcttctcacagttctaaaggctgagaggtccaggatcaaggcatcttctgattctgctgctgctgggggttctcttcctggcttgcagatagccctcttctcactgtgtccccacattgcagagagagagggggagctctctggtgtctcttataagggtactaatcctatcagctcagggccccaaccttatgacttaatttaactgtaattactttcttactccaaatggtcacattggggttagggcttccacatatgaattggcggggagggggtaactctgtccacagcaggtgttgctaataggttctgccgtttcagtccagtgcccagagtgcccatcagttcactccagaactgctccagttcattccttggggcagggatttggtaccatgactgctcttgatattgctttgtagatggaacttttagcctttggatggggggtctagagaccccccatccaaatttctcaggtctggcaggatgtggtgcagagtctactacaatggcagccctgtgaggctgggatttttgcctgttccattcaggaaagaatcctcagcacatagaacagtgcctggcatctaataggtacccagtacatatagccagatagctgcagttcagcatttgtgttcacatgcgtccattttccattcatttgggggttttttagtcacaggctaaatgagattataaattattgcatgttttcttttcactttcctccccaactcacctctattcaagtcgaactatctctggtcactgtgaaatttgtttgcaatagaagaaattgcgtggtacagccaacataggactgctcccagtgagatacacacattgaaaaacagagccagagagagctaaaaactggaatcgaaatgaaatcagtaaaatagctttcatgaaactcatgaaattcatatgaactaggaagagatattggcatgaatgaattttgactttaaagatgaaaaccatgtgtctccacccaagttgtgggttaaatcttgccaatgaatgctgaaggaggcacgtgaccacggccttcccaagtgtacaaggaagaagccatcagggagtgtgtcgcatgttcctctgaagtgtcctcagttgtcagcctgggtcttcgcggtggagtgaacattacactcatcactctgcaagaaaggagttttcaggaaaagcccacgagcgccaaattatacctctgacttttatcctagatttgtaattaaaaacatgtttaaagacctaattatttgcgtatttcccttcagagttaacccctttaaaggatctttaataccttgctctactgttctgactaaatgtttccacatttttttccagttaggctcactgtttcacttctggaaaatattgtgtaattatttcccgatggagtgaaaaccccacgaagtccccagtgccttggtgacttcaactttattctcccagatcgagttgcatttaattttgtcattctatttaattaattaatattaaaaagatagttaccaacgtatgatttctggtctggccagctgaaaagtcttcactttcaaattaatcatatattcctctgataagttgcacaattgtcattgcttcccatctttctcagttttggttttgaaacaggatctggattaagatgatgttaaagtaaaatttgtcctatatggtgaaattaatttttctttctaactcatgtctcatttgtagccagaaactcattttcttttttttaaggtacctattttatttctaatactgcatcacctataacggtgcacaccaggctggtgagcagtagggtggctcctgccttttaaaaaatgctcatgagcaacccacatgacctacgaagctgctctaatgtactgctttctggaattaagacaatttaaattgtacttttaaaatatagttttagaaagtaacatttatgggattttttaaatacagaaaagtataaaaaataaaagtaccctatgcatccaccagccagataagttgttcctcttttcaattttttgtagagatgaggtctcgccatgttgcccaggctggtccgaactcctggcctcaagtcatcctcccacctcagcctcccaaagagctatgaggccaaagtgggaggatcgcttgaggccgggagttcaagaccagcctgagcaacatggcaaaaccccatccatacaaaagttagccgggcatggtggcacacacctctatccccagctacttgggaagctgaggtgggaggatggtttgagcctgggaggtcaaggctgcagtgagctgagatcacgccactgcactccagcctgggtgacagagtgagaccctgtctcaaaaagatactcatatgcatggttagcaaatccaagagtatagaagaaaataaaatcaagagtaaaagtctcttttcttatctactttgtaaacatgctgtttacgatttttgtatcttgtctccttgagaaatttcacagagagagagcaatcaggaaaatttttgagcgcaccatataatattgattctaatagcatatcattataaatacaaaccttatagtaacatatgtagtctcaaggactatatatgtttcattccttctgaggaatggaatagaatttattagcttccatttcctaaaccaggaaataatgtactagtaactgttgacacttacagaattggccatttgttgatacacctctgaattaaaacttggatttggcagatggctcagctactctgataaagttaaaggtttgctaaatctttaaaagctaaatcaggagttctaagagaagttttcaactttcctactggtaacatgtgtccagcatccaaagttgcctgtgcactggcaaatttcttgccttaccctaatgccagtgtcattttctgagacagactaacgcatacatttattgaatcctactatgtgccagggtgagtaagaaatttcctctgtcctcagtgcgttcacagtttagcaggggaagcagacactgtattaccaacaacctataacatatattgctgttaaaatagaagtatgagcaacgtattatggaaccacagatgggaagtgattaatttatactggaaagccagggaaggcttcacagagaaggcgctggatgagtcgcctgaccttgcaggaggcggaggaatgtgccaaggagagaaggcgcctgggcagagcacagtgctgggcagatacacgggacagaagagctcacggcaggtctggggaatttggggtcagctttttgtagcagcagcacgtgtggaaagaaggagcagaggctggaagggtgggttcccaggcctgttgctgaaggctgaccttagtggtcatgccgaggagcttgcctctcctgtaggtgggagtgagattgtgaggaagaggatcccactcaaaattcgtcatgaaaaataaaaccttgacagcagcaggtagagagactgaaggcaggaagccagttaggaggcccgtgggatagtccaggtagaaggtggagaggcctgaacacagtggccgtaacgatgactagaagaggacagattggagaggcatttaggaggcagcatcagtggaaccctcaactgctaaattggaatctgagtgaggaggagggttgagagtggcttcgggctccttgcctgtctggttgatgaggctgggggtgctgaagagcaagggttggagaaggagcatctccccagtggacgagctgaggtcccctgaagagggcctggcactcagagcgacactgggcccagacatggagtcagggccataggtggacctggggtgggtaacgcctaggggtagaggagcctgttccaggagctctgagtcaggcttctgattttgaaatgactccagagggagtagaatcaggtatataaatgagttaatatcgaaaaaaaaaaaaaagagcaggaggaaaattaagtagagtggctgaaacagttacttggcagatttctccctgagagaagctggtcatgagtctgttttccatgtggccttctagagagacatctctctccaatctgctgatgagaggatgtgtggggaaaggaggggtcatcccccacaggtttggggtaactgggcacctgttctcaacagaagagctaccattaactgcggatctcttctgtgtggggcacgtagattagctcacaccatcacagtggccctgcagagtagacccatggggttctacacatcaggatggggaagctctgggcaaagtgagaggcggagacgactggcatcagggtggctggctcccctggcgaggctgcagtgtggcttgggaggacgttgtgacctgccccagaggaggcctgaggctgctgttgatgctaccatggctgctgttgttgagaatgccccgtggttcatggtttatggatgacattagtgatggtgcattctactaaggcggcactggctcctggcagattcacccactcttagcacctgtcatcttggaaaagggtgtaagctggtgctgcagccttcccttctctcagaagaaactttctgacactgagccccaagcccagagtatcctctttctctccttaaaggggagttaaaacttttttctttcttcttcttctttttttttttaatagagatggggtctcactatgtggcccaggatggtctcaaactcctgggctccagcgatcctcccacctcagcttcccaaagtgctgggattataggtgggagccaccatgctctgccctaagagttgaaacttttaaccgaggtttaagaatagtataaaaatcctattttttaaatagaatcaattatagtatctacagcaacctaaaatgtgtcaactgaatactgaggtgacttctctaggtctcagattggaaggataaagcttatctgatgctgtgtgtttctggctgcatttttttgctcccctttcctctcagttaatagcagatcagagaacagaaggagtttgctcagggccacctgagaccacggtggccttcttcccttgaggtttttccaacagtcactcattcgtggaccaaaagcaggccttgcgggaagcttgattctaagggcagtgaagacaggagagcctggggttgagactacaaagcagtgtgagcactcaaggaacctcaagtgaggcaaaggaaagcctgggagaactaggccagggaaggggaattacctgtggctttagggaaagggaacggaagaaggtgcagcttggcagaggggagggcggggagcgtgccgcgtttgccaggcttctcttaccaccctgagttttgctgcttctctcacagagtgacaagtttgatatgaggctccattagataaggggtctggtctggagctgtttaattattctttgatgtgtttggcagattttgtaaaaaaaagaaaaagaaaaaattaaaattaataataataacgatgatgatgcaacccaaagccctggccattgtgggatgcaggaaagcctcaggaggatgatggggacagagctgtggccacctggtccctggggtcactgcccagttccagctgtggcctcactctctcccttctccttcttcagccagacccttggctctgatctgcttttgatttgaaaggactttagaacatttcatgcacaatttccagaaatatgttattatcagtagcagcttcggggcatgcacagggtcctggacttacaggacagagatccgtgtggagtgacagcactgccttcctccacttacctttctgtatgaccatgaattccttgacctccgtgctcactttgtgaagaaaactggcagggattaccctctccatcagagagatgaaagagtctgagctaccaagaaagcaacggactcggccagagtcagccagcgggccgggctttcctgccagctcggcctgtgtttccttcgctgtgctctctacttttccggagggcgtcccagctcagagtcacccctcctccagaagtggttctggcctgatggaggacttgaaccatctggggcatcttggaaaagagtctgtttgaaagcctatagaagtgttccaggatggaaagcacactagtcatgtcggccactctggcctgggtgtgagagcatctgcccggatgggaagcccttggctgacatgtaaatgtcagctatgtcaagtgcccagggtggtggcgctgggggctgggggctgggggctgggcaatgaggtggaagtgcctgtgctgtgctcacctagaggaaggaacctcacatctcagttggatttttcatgcacattcctgctgtcatcccaatcatggtggccaactttggagtctccttggagagcctgtgacggcctcagtggctgtgcaccaggcccaccgatgctcaggggtgtaggctgcttccgggtctcatctcagatccccgccagttctggctggcgctgtgtcacctcttctctgtgtcaggatcatttttatccctctctgtctgtctttctgtctttccctgtgccctcctttcttccccggaccagctatttcagattccattcaactctgttcagtgatgctgccgctctcaatgcggttagagcgcaagatgtgagaacgtctgtgctgagtggcctaaacactgaaggctgcgggtctttctaatttcagcattgagactttacaagtccacattcttggcattgccaaccagttagaatagaacaataaatcccagtttttgtcatgggcgtctgtaattaaaatggcaactggaacaaggcagtcacttactgagcgctgatggggtggccaactctgtggggtgctcaggaagacacggggctgtgagatatggactccacttagagggctcacctcgtagtcagcaaagagacttatccaggacatgtggaaagaatgagtttgtgcttggccatgctttgggggccatcacaattaaatgctcaaaagtggaggaggggctggagtatgtgggggatgcttcacagagaagttagaacctgtgatccttgcggggagggggatgggatctagagaagttgggagagcaggtgtgcgtcctgcacggaccccaagtgagcgagggcccggcagcctgctcccctcgacaggcaggccacctcctgcccccaggcttctgcccccttcagaggacctgggaacaacgccgttctggacccaggtttcagaacacttccaggtggagcctggctctgagcaattcagtttgccagcaggagctcgactgccactccgtcgtcagcctttagtattcctgccactgtccatccttgtctgctgtccctggacactgcagccccattgtgaagggctgtcacaagatgcaggggaggcagccaggcccgggagaactgtcacactgttcccaaggttcactgctcttcattcagtggccagagaggtttgatgtgcataaatttccactttgaatgtgtgagctccatgatagaggaattcagttttgttggagtggccctaaagctcctgaagtaacaactagaagtttccaaaaggaagatgacagttttacctaagaaagcgttttctgactctttgagttttctgaacatgaagtggatgggggggtgccctgtccctggaggtgctgagcttagagagggaggaagcggatggggaggtgcaggtgttttaacgccaggctgtctcttcatggcgtgccatttggtgaacctgtttaattctgcttttcccccctcagctttcagcgcccccagctgcgtcttctcgccccttcatgtttccctctcctctgccaggcagtgaactttctcagctgctccttcagtttcacattgaaaggcatcgtgttttctgttttgtccaatagagtattgttacagttttctgtaagctttaagctatccaaaaatgctcacagaaaaacaacaaacacccacaagatagaatttcaggatttagaagtatttcccggcaagggggccgggattcgcactcaggccctggggccacagagcccgcagtgggcctccccctgatgctgggcgaagccccaggtgtcactcctgtgttcccgtctcgctttgcagcttcatcgctgtggagaacattgacagctactgcgtgctcatctcctccaaagctgtttacttcctgaaaagtggagactacgtggatcgagaagccattttcctagaagtcaaatacgatgacctctaccactgccttgtctccaaagaccatgggaaggtgtatgtgcaggtgaccaagaaagccgtgagcacgagcagtggagtgtccatccccggcccctcccaccagaagcccatggtgagtgcctggctgttctcaggctcctgaggggcggggccagggcctcgatgcctctgccctgcttccccgtcctcagcaggaactcatttaggaggttgaggctgggcccttcccaggagtgctgcctctcagtcctgaacatgggaggggcccagggtatgttcacggggcgatgctgccctcccagctggcccatgggtgaccctgggaacattaactgcctcacaacgtttgtgcctcagttacccgtagatgtagtgagggtaacaatacttactctcgttggtgataaggaacagctaacacaacacacagggtttttctgctcccaaaatgggattcttcagtgcaccaaatcgaagaaagcactggagctcacgctggtttctccattgtttctccttaacagtggaaaccgtaacttttgttctagtagcatctagcatgctcaataattatttgtaaataaaagttatactttccctccaaaggggacaaggtattgttatgacaaggcttttaaataataaagctcctgcgaatagctaacgttcctagagggctggctgtcttgtgggttgtctgatcactgtgttgctgtcatcccctcctcactattggtcatagcaggtgattcattcaaggctacacagctgaccttgaggagccggggttcaaatccgagtggcttggcaccagagctggctgcagagcctcttgcggatctgtctctggccagtcggccctggaggcttgccatgacacccaggtgttagtcctgctcattctcacccggcatacccggattttgaagcttgcattcaagaatgatacattaatcaaaagggcctgcccacctctgctctctctatggatcggaaatagcgccagccttattgggcctctctcctccggagtcctttggcctccccctgctcatgaatgcatttgggcctgtttggacttgtgtaaggctcccgtggggtcattggcttaagttagagctggctgatgaagagggcgagcacctcaaagtgtgagtatttctccagatcccttcactgtagcaggtgggcagcctcgcccactatacttctgcccctttcaaagcaggtgggcagagaggtgtttgtggtaagaaagacctagaggcttttgttcgctgattcttcttccttcatcagccatcaccagaccttagatgtgaatcccccattcttgctcttggtcttacctctgcagatcagttatggccgtgggggggagttcccaaatgtcaggtgagtatgggttggctgtacagtcctggggaatgtttaaaaagaccggctgggcgcagtggctcatgcctgtaatcccagcactttgggaggccgaggcgggcggatcacgaggtcaggagttcgagaccatcctggctaacacggtgaaaccccatctctacttaaaaaaaaaaaaaaaaaaaaaaatcgttagctgtgcacatgcctgtagtcccagctactcgggaggctgaggcaggagaatcgcttgaacccgggaggcggaggttgcagtgaaccaagattgcgcctaggcgacagagactccgtctcaaaaaaaaaaaaaaaattgcagggacccaccccagacttgtgagtgcgagtgaagcaggagcagccctggccatcactgtttctttgacgtgtacatcccatcctgagatgcagctgggctgggagccgccacctgggtggatctgattcctggatttccccatcctggggacaggtgacccatcctgttctcctccttaggtccatgtgaaatctgaggtccttgctgtcaagttgtcacaagaaataaactacgcaaagagcctctactatgaacagcagcttatgttaagactcagcgaaaaccgagagcagctggagctggactcctgaagccccgctgctgagatgggcgctcccgacacagcgcagacccaccaggaggaaagaggcccagctctcagctgacgatggaggcagaaccggagtcgggtttggggaagttgtcaaggaatgagggaaagtaaatcctcatgaggaaaagtacaaatggaaatcgtattaatttgtgaggcagggagttattttagattatgggaaataatttttaaaggtattggttaaataacgtttaaaaacatgtactgagatgaatctaatttttagattgccctgtattttgttaacatgtatatatgtacaacagtgtgtttgtaaatatataggaacgtttctgaacagggtctgtgctatgtgtaaaggtttgttaactgtaaagtaatataaagttatattggatcttctattgcactaattctagatgtctaattcaggatactgtctatagaaaggcattcttaaaagttaaagaatgttacgtcttagttttggagactaaagtattcccagtaaagtgggttgaggtgagggctgtggtcctgaaagggacgcctttgacatcgtggctgtccagttgggctgtgagctgtggcacccaggactggcgctggcccttcagaaggatctaggagaggggcttgggagcccacttttaatttctcacccccattttacaaagagtgcttagattcttacaaattatgatgtaagttatccatttggctttttcctaactagtcttaccaaacttagggggaaacctgtgctccattaccacatgggtgcaagtcagcattgtaagttttctcaggttattattattagagaggttggaaacattggtaaactctgttgattgagaaggaaaaaaaaagtcccattgaactgttgcaacaaatcagaaatccacataaaagtgctctcctgcctgggcagcaacaaccaagaacaaagccccgggactgttttctttttaataaagccacaggcaggcatcgtagctccacagcccgaggggacacaggatggaaaccccaggatgagaagggagcagggagagttccagaaagggggatgaaataggagtattaaaaagctgcgttggtaagtttttcatggaaccaagatttgacaaaggcatctcttatccttggttttaaattcctgctgggagcaaggcctggtatgagcgccctgggtcttgtttttggtgtttcgcttttctgtaaggattaagcagatagggagaagggaaaaggggcctcactttagaatgaatgagtcaccttgtgatttttaaatttttattttaataaagctaatcaatttctacaaccttgtcacatgtagctgagtctgggatgactcagtggatcagtggatgcgtggaaggttttggtgtttataactcatgacccaaatccttccaagacacaaatgaagctaatcttcttcccctccctttcctctcccacttcccctctgtgtctgtgtctgtgtgtgtgtgtgtgtgtgtgtgtgtgcgcgcgcgcgcgtgcatgcagagaggaaggaagggagctttagcacaagtagctacatagtgttcaaggatcagctttcttgaactccgaggcttggttgcctttgctgaactccaagttagtggattgcagaatggaaacttggcttttgcggcactgggtgagttttagtttgtgtgtgtcttgctggggggtggtgatgattgtctcagcactcacgcactgcacaagatggcagcaggatacagcactgcacaagatggcagctcctctgcagcttcctcctcagcctccctccttgcacccccacaggtttggcttgtggtttttgtcatcagtaacctactgcctgagatcatgatctcttaaaagatgagactctcggaagggttgattgtatgcgtcagtgagccttctatcaccttctggaacaaagtcacttgaaatctcttgatgagattaaggagtttagtgttactaagaaaatctgctttgggccgcagcagtgctgggtgttctcagacctgactgaggaagttagctgcgggctgccctgtgggctggtgcttcaggaggaatccagagaagtgttcagatgccccccttgggctcctttctaattttaatcagctctttaaatagctgcccatctcctgtgattgcacaaccaagcactttgacatttgcaccttaggagaggcagatgttaaaatggaatccaaagaccacctagggcggggctgggtgggagatgggagggccaactgcgagctgctccacttctcagctctcccctgccctgcagccctgggccagacaaggccagaaggtttcaggggcatttgacatcccctcctggttctcaccaggaaaacatccaaagctttggaggaaacaggccctgcccctggctccttaaatgccccgtctctttgtaaactgatattcagccagcaatgcctaagactttgttaagatcatttctactgcttttctttctgcttcaaacacacagttcgtctctgaggaaagtaaaataaatggaataagagtaaattgggtaaggagatatccaaagctacccagtcccttgacccagcacagttggccgacccgtgtcactccctggctgtcgctgcttctctgtgctcactgaagggtgagccaggccagtgcttccccagcccctgggcctggtcactacacagtggaaaacagacaagcggccccttccccaaatcccaagagtgtcttgctgcttggtgggtgctcatcgcaatgttctgaaggctccagggccactttgtttgtaagtatgatctgggcctcaaaataccatagtagctgcttgataaaattctaaaaatatctggttctctattatgtaaacactattacagtcaccagtgtgtgaagactcttgagtctggttctcatatcagagtcatcatttttcttcctgtggaataaaatgccttgtggacttcccaaacttgttcttttgttttcttctggtctcttggtgatccacagcttctagagctatcaccagtgacaaataccaaacatagtgtgatgttcacaataaaatgtggcctctgcccccaggcctggggaagcacccccacaccttaaccagtctcagcctcccaagagtaagtagtagtctccgcgctacactggctgctgatcagtccattctgaggttcctggtccaagccccagcaggacagacgtcacacttagggtttaggcagctgaagaagaaacagcaaaggaggccgggcatggtgactcatgcctgtaatcccagcactttgggaggctgaggcaggcggatcacaaggtcaggagattgagaccatcctggctaacatgatgaaacctcatctctaaccccgactatatcgcccctctctattccatccactccacctcaaaattaataaccttgtgtgtcgcccaaattttcaccacgttatataattatgtgtataactaaaactacaaaaaattagctgggcatggtggtgggcgcctgtagtcccagctacttgggaggctgaggcaggagaatcacttgaacccgggaggcggaggttgcagtgagccgagatcacaccgctgcactccagcctggcacaacagcctggcaactctgtctcaacaacaacaacaacaacaacaaaacagcaaaggaggctcagcaggatcatccagagatggagtgacaccaggagggtatggatcctagaagctgaggccagaaaggtttcaaagactaccgagggctgctactaagtcaggtgggattcggaccaacaattatcagtggacctagcaatgctgaagtcactagagacctttctaagagctgtttcaatggagcattggaggtgaaagccgggttggagtagattcaagaggaaaatggaaggagagaaataacaacagctctctacaggaatctggccataaatggagagaactgaccggaaattcaagagggcagggaaggaataagggagaagagggcctggcgggccaggaagatgggtggaggtgggggagcttgagattccattgattgctcctgatttctcacatcaggcaagaatgaatacagggcgggaagtgatgctgatttggagagagagaaggtgcacgtagtcatgtagggtaacgggaaagggaataggccacagaagcatggtatgtttgccgggcgacattaaggacccatttgacgttgatgaccgtgaatgtacagtggaatcgggcagcctggctgtattcttgtccggccacatgtagctgcacagcttcagtgttgtagaacaggcaaagaactggctttaatcaagaaatgttcccctcacctattcaagtacctcatccaccattgcccagttgaactggccaagagccaatcagaacaaaatgtcaacagaaatccaaaagcctagagaagggaggggctacgctttccaaaccaaagcacagcttctgaagactatgccccttccaagtgggagagacagtggaaggtgtggttaacaacccccacacgcgcacacaattagactcttttcaggggttcacagatgcagtgggacagtcagtgtttgacagtgaaccagccaggcactccagggcatggggatgtcattgacatagaaagggtatgtgtatgacgatcttccatttcctcagccgaattcagcaagccgtcttgcaggtattggttggctgcaaacacagctttcaccccagctctttagaccaagaatgtgatttctagcaccgtaagagatacttgatgtttgctgttcactggacactgcatcccaagaccctaataacagaaagtgcttcctgaaaacacacccaagcatgttcattattatttagaagtttggattaacctggaagagcacttcttcaggaaattggaagtgagattgcactcgcatctgcaagggtcttgaagatcatccaagttgtggctctctggctgagggcatgataaaagcaatcataaagaccaaagaaagggactgtaaacctagcgctttaggaagccaagccaggaggatcaagaccagcctgggcaacagagggagac

SEQ ID NO: 1767 - DNA, 4802 bp, Homo sapiens
agtttgctggaacattatcagatggcttacggaagacgatggacaatcggcatcagtcagagcgggagtacatcaggtaccatgcagccacaagtggtgaacaccttgtagccggcatccatggcctggctcatggtaagtcatgggtgacatcaggctctgctgctgctggtcctcagaggcgcctttgtatcaatctgattgcagctataaaaaaagaaaggtgggctgggcgcggtggctcatgcttgtaatcccagcattttgggaggcctaggagagtggatcatgaggtcaggagtttgagaccagcctggccaacacagtgaaaccccgcctctactaagaatacaaaaattaggccaggcacagtggctcaatcctgtaatcccagcattttgggaggtcgaggcgggtggatcatttgaggtcaggagtttgagaccagtctggccaacatggtggaaccccatctctatcaaaaatacgaaaattagacaggcgtggtggtacatgcctgtagtcccagctactcgggaggctgaggcaggagaattgctcgaaccctggaggcagaggttgcaatgagctgagatcgtgccactgcactccagcctggcaacagagcaagactccaattcaaaaaaaaaaaaaaaaaaaaaaagaaaaggctgacaacagaggaaatcctgtgttggcgtacctgatagccttccaagctctcttactttatcctccttgcagttgaaatacgacagccggtgagaactcctcattcgctttctgaatgttgtgcacattgcaattccttttcgttctctggcttctgttcccaaagtatcataaggtgtaatcaaccagacctgttcttagaattgtagctgctacttctcttagaattgtaacctctgccttctccttactgatcattccttccaaagaaatggaaatgaggaatttgtggccaggtttgtagcccaggtgttttttagttttacataaatgtgcattcactaaaattataaatttatttgcctaagagatgttggtgatggcatgaatgcatttggtctctgactttgaattcttttaatgctttaattctgagtcatttgccttttgttgcatttttcttaacaatttcttagtacggcatccaaggcccttggaactataaatccagccaattttccaaccaccatccttcagccatgctgcactttggccacacacagctatgtactgcttcccaggtgtgcttccaagtccttgctcacacatggtccttctgctctccctcctctgcctcatttccttgtctatcaaaatcctactcagcctgtaagtcccaactcaatacattttcccagctctattgtccctgttagagttaatgacagagcacagtctgggttgtgtatgtcaccagctgtgtacatctgatagattgagaatgtgaggaggggagaaggaccactttgcattcacctttctccttgtgtacctcacatgacacctggcacatagctcatgcatagtaaggcttagtaaattaaactctttgtaccagatccttaggaaccatccaaagctatcagagtcatatcaaacctgatcagttttaattatctgcatttgaaaaagatgaaggaatatagacagtgcaatattatatttctatttgtgcttagggcacgtttagatagaagtttttgttgatcagctttcctaatggtgagatttggatcaaaatgcgtttgcttttcgtaaggctgcccatccgtaaagggagctgtccctaaggagacgtcaggccagaagtgaaatttggctgaaagtgatttgtttatggattttaaaagttgactgttgggcaatcatttggggttaaggtttaatcattctttctcgtaatggtaatgacagtacattggtctcttagaagacttttaaaatgaatataaaatgctttgttatgtgtggtggcctttatctggccagcatccttgtgacgtggagagagcatggctctcctcactttctggatgaacacacaaatgtgctgagaaaatgcatgattggttcaaagttgcaaaatcacctcccatcaagaatcattcctataatatgtacagcctctccaggagccaatggcttcatccaaagaggatccactgagctctgggttatacgaaggcagtatcctagagtgagagtcttcccttaggatgaaaagacctttagaaggtgataagaaccagaatccactcaatccccttgatgtaagaaatgggaattgtgctcagttctctctgcaggccttgctggacccaggttcagtcatgttctgtctctcaggtcccagtctgaattcctgttctgtgtgtgctctgccaaaaactttgttcaaaagtttgggaaagggctgggtgcagtggctcaggacagtaagcccagcactttggaagacctagagggagaatcgcttgagcccaggagtttaaggctgcagcaagcggtaatcatgccactgcactcctgcctgggtgatagacggacaccctgtttctaaaaaaaaaaaaagtttgggaaagagatattgcctcactggagcaaatttacccagaatccaaaagaaatgttgtgaattgttagtacattctcacccaaggagtttcctttaccaatttgtctcactagagctgaagagtctagagagcttcctcacaccccactgtcagagggtaaacatcctgtgagtgtccctggcacaggtcctggagatgctccctagacgggctgcctcttcccttcagtgactgtgacctcttcagcctctgccagcttctggcctcttctaaggtgttttcagccattgctgtcaacttgcaaaatgtttggaatgcctttttgacctggattggtcttttgaactgactccattgagggtcccagccagctttcacagctttttggggtgctcttcatgaaggttttatataatcgccgataccgaatttcatcaaagcatgcagtagcttttaccttatttcaagcatccagtggggttggccagtcacccccatagtgttctttgaaaattgcaaatgtataccatcagctctccatatccacagattcagccaaccatggatggaaaatatttggggggaaaaaagatttcacgaagtgccagaaagcaaaatttgaatttgccacacgtttcaaatactgtattgactccacacaaatgaagtgatatgtgggcatcgtattagctacaataaataatctagaggtgatttaacgtatacaggacggtgtgtgtaggttatatgcaaacacctacagcacattatgtaagggacttgagcatcctaggattttggtatctgcaggggatcctggatcaatcccacatggatactaaggaacaactacatttagttatctctctctgccttagatatctttcttttcttttctttttttttttttttttgagacagtctcgctcggtcgccagactggagtgcaatgctgcgatctcggctcactgcaacctctgtctcctgggttcaagcaattctcctgccttagcctcccgagtagctgggactacaggcacgcatcaccacgcccagctaatttttgtatttttagtaaagatggggtttcaccatgttggccaggatggtctcgatctcttgacctcgtgatctgcccgccgcagcctcccaaagtgctgggattatgggcgtgagccactgcgcccagcctctgccttatatttcataggatgccatcatcttcaaactttccccgaaggcccaattttctagtctcctgttgatttaatcctctatctgtatcctctcctgatcgtccgtaggctgcccaagctctgggatcgaaaaattggccactgttaacctctcagcttttctctgatttttttttttttttttttttgaactggagcacactttacttctgactaacatgtaacatatatcctctgactctggacttaatgggcaaatctgcaggatcctcttctgtgagttggcctgtctgtggcctctctggcacagagattaatagaatggccttaagttatcattccataatcaaggggtttggctttaaatgcttttgcttttgtcctcgtcaggttacaacagcccttgtctttttcactaggtatcattggtggactgaccagtgttataacttcgacagtggaaggtgtgaaaacagaagggggtgtcagcggtttcatatctggccttggaaaagggcttgttggcactgtaaccaagccagtggcaggcgccctggattttgcatcagaaacagcccaggcggtgagagacacagccacactcagcggccccaggtcagtggtgtgggaagaatggcttttgcagtttccagcctaggtctgctgcttctcctaatccatactgatgtgtttaattgtgcactttcttagttatagggtttttaattcaaatacttgtaactgaaatttctgatctgcctaatataaaaagatgaaaatgaggtacagaaacctggcatgaattttttcagataaatatatatatagcatattttatatatgctatatattttatatatgtatgtatatatagcatattatatataagtatgtataactatattatgttatttttctccattagagaggtcagaattaggattaaactgttagaagcttcttctgttcaccaagccaactggatccccacatgcctatgaagaaaactgtcagattg

SEQ ID NO: 1768 - DNA, 274 bp, Homo sapiens
ttttttttgagatggagtctcgctctgtcacccaggctggagtgcagtggcgcgatgtcggctcactgcaagctcagcctcccgggttcaggccgttctcctgcctcagcctcctgagtagctgggactacaggtacctgcaaccacgcccggccaattttttgtatttttagtagagacggggtttcactacgttagccaggatggtctcaatctcctgacctcgtgatccgcccgcctcagcctcccaaagtgctgggattacaggcgtgag

SEQ ID NO: 1769 - DNA, 425 bp, Homo sapiens
tccccactgttgttgttcaccatgtgggtctgttccttcttaattttccttccgcttgaaagtatcagccccaaccccataaagaaaagtgccaccccccatccccccagcaggtcagcagttctgctgtgggattgctgtctggccttgataccagctgagactggaaatcagggacagcccatatggttccaaaccccacagaacccaactgctttaacgtagctgtttgcttgaatggcctattttagcctcccttttccagagtgactaattggggattcttatcaacaaagggtataatgaatgttaagggcccagccaagctagactcgacttaagcccagaaggattttgctgctgcttggataatagattttccctgagtgaattagtacgcccttttagaatgcctagggcctggc

SEQ ID NO: 1770 - DNA, 16037 bp, Homo sapiens
cgcggcgagcgcagcagcagggccgggtcctgcgcctcgggggtcggcgtccaggctcggagcgcggcacggagacggcggcagcgctggactaggtggcaggtgagggcgtccccgcgcacggctggggtaggggacgggagtggcgagcttcaggtccaccggctgccaccgagtgatgggaccggaggacaggagaggtcgctcagccaagagccccggggaggcggtgccttctcggtggggtcagcaacggtctctggggggtgcctgggagcggcagccggtctccgccttggcggcccacagccaccgcggacgcctccctcccggatgtctcctcgctgcccttccctggccgaagccctcccctgcagcctcctccccacctgccggccctgtgttctcactgctcttctctgctctgggatccgcaggatgacgtctgtcctgcttcttcactgtcctttacagtcaccagtctcggccgggcgcagtggctcacgcctgtaatcccagcactttgggaggccaaggcggtcggatccttggagatcaggagttcgagaccagtctggcaaacgtggtgaaaaccggtctctactaaaaatacagaaattagccgggcatggtggcccacgcctgtaataatgtcagctatgtgctgaggcaggaaaatcacttcaactcgggaggcagaggttgcagtgagctgggattgcgccactgcactccagcctggcagacagagtgagacttcgtctcaaaacaaaaaaaagaaaaacacaaaaaaaccaccaccaacaacaacaaaaaaataaagccaccagtctcggagtttcaaatctgagcactcttatccatcttaattctttcaataattcagctaaacgaatggggtcctgagaatctgcagagccaggctcagcgctcgcctgcagagcctgcggtctgtggggaccaccagcaagatgaggaatcaccttcgggaggaagggtcgtgctggggagggtcgcgccggcggggtcaagagaacctcctccagggtgggaatcagagcctccgggccgcggtgtttgagggtgagtggaattaatgccgtgatggacatggggccttctaagggggaccaacagtgtttgtgaagagttgactttgggaggggttcaggatggccagaggtggaggctgtgacctcagtgagtctggatcaagggagggggcaggtgggtaagacaccgttttaacaaggtggctttgagcggccacctttgaggggcctaagggcccctgggagatttaggaggaaggacaagaggattaagacaccgctttctgaggtgccgtgtggctgtggcgtgggggtggctgggggagtgggttgtgttcattgtccaaggctctccagcgctttgcgtggcgttttggggagcacagatgaggtgtcccgacagtggggagtggctctagggagaccagaggctcgggagggggcctgggcattagaccaggcacagaatccgaagtgggaagaaatgtgggcgtagagggcaggccttggggatgggtgtgggggaggagggggagatggaaaggagtcagggaggtctcccaggctcacctggaggagtcagggtctcatttccaagtgcactgggaactgcagcctgggggtgggggttcatttggtttcaggcctgtggccaagagacccaccccctcacattcacactttggtctccagtggcttcacaggcaccacctccttgttctcgcctgttttactcctcaccttgggctgtttcttgcctttccattctggcgttctgcagggatcagatccttcctctcacgcacaatctacactcatggcttttgctgggagtaatgagtaaagctcccaaatagatgtttctgagttaggaagcacattaaaaacaaaacaaaacgaagcaaaaccacacaattgtccaagtcccactctgtgttcaagggtcacatgatgtgcagaagctggtgatgggcaggagctctgaatggagttactgggatgtcaggccgcgtgggcctggggcaggctggctgactgggagcagcctggctccaccccggctgtccaggacgcactcacttgcctctatggatgacagctccttgcctcacagctgtctgtctctgggtcagattcagcatctcagtgtcttttgtgtatcagctgaatgtcagggaggccacaggctggtgcccagttgaaaatctcacaaggactctttgtaaatgcatgcaagaataagaacagcattttcctcctcctccctgaccccattctcctcctcagatgggacgatctggtccttacggaaagaattggagttcactgcttccagctctgtgtgtgtgtgtgtgtgtgtgtgtgagagagcgagctctgcaggcgagccagttctgttgctattgctggtttgagctgctgccatcaccacacttagctaattaccttaacatttgcacttaatttttggccggagactaacagaaaataaatttttctccaatttaaaatacttacgaactttaagaagaaaacaaaaagtacgattccaaaattgccctgtagtaagtaggtcagtaacattcagggagtgtggaaactgcatttctctttattcttcccttccaggccctgcatcatggaaactctttctaatgcaagtggtacttttgccatacgccttttaaagatactgtgtcaagataacccttcgcacaacgtgttctgttctcctgtgagcatctcctctgccctggccatggttctcctaggggcaaagggaaacaccgcaacccagatggcccaggtaagcttgcccgtccgccaggagcagggactggcctgggctgcgtgttctgtcaccagcttcacactcacactccagagccactgagaaaggagggcaggactggggcccgagtgtgcactggccgtttcagggaggcggggtccactggggaagaagtggggcagggcagggaggcaggaactctgctccaccgagatttatttgggggaaactttcctcggttaatcccttggaaaagaccatccaagctgtcttgtcctagcgcagaatctttctttagaaaatgacactgaaattatttgaaacataagttgcaaagaactacctcttttttggagcaagagactttgtaactaaactttcattggtaaggaaggttaatacctgtttcaagttgtttctgtaccaacagctcagggagggcatcaacagaaatttgcaagaaggattccagggcaagtgcttcattacagctgcacactgtgcaggtactgctcagctcagtctcaccaacattcagagaacctgtggaaatgattcaagatcagtgcttgtccccagacctttgtggaaaggagaggagacatacacgtgagatgaaaccgaaaagcgccatccctgagtgcaggccgctggacacgccttcatcatgggagttgtcctttgttcaatatgactgtctttttctttgatgacgcttttcaatagtgaattactcattttaataatttcccagctcattgtgtgaagaagggagggtttatgtgtaaaggctaccagccttaataataagcacagagaggctctctaaaagatatatatatttggaaatagggcattgcaatgaaaatacgcatgccatggcaagctatgtgcacattcagggaggtgaaataacactaagatttttaaaggaaaaagtaaagaggattacataattcctttgaaataattatttttggcaaaaagatcaataacgaaggtgatgtcagtgtgaggttggatggggagttcctgggtagatgtccttgcacaagtattttgttgtgtaaggctgtgatggcctttgtgcaagagcgtaggtttttagagtcctttgtgatagttgtgttatcaggcattcaagcgtgagaaccctctcttcatggccttccctgtctgtttgtcaaaggtttttggttttgtttttttaatattagtgactccattttgattctgaagttccttatgctgaaatctgtatgatctttttctatgttttaggctcactgataaacccttatagaaagcttttttgagagcaccaaaattgtctgggtaccttcttaggtgtgagactgagctctctccatggctccagtgttcaactggatgcttgtgagacaccaaacatactgagtacacgttgctacctgtaacatgcagggaagcgttaatggcagcagaaatattttaaagaattatttatttttccttcattatataactggtaaaagtccactataaaaatttttaaaaaataaaagtagaagggaggaaaaaatccctatgaatccatcaaacagagacaaccacccttgataatgtaaagcatcttcctccagtcctatttctttttttttttttcgagacagagtcttgctctgtcgcccaggctggagtgcagtggtgcgatctcagcttactgcaagctccaccccccgagttcacaccattcttccacctcagcctcccgagtagctgggactacaggtgcccgcccccacgcccagctaatttttatttttagtagagacagggtttcactgtgttagtcaggatggtctcgatcacctgacctcgtgatccacccgccttggcctcccaaagtgctgggattacaggcgtgagccactgcgcccggccctatttcctgattttcacttgacattttgtactttggtgattatatggtatctttacttttataaatgatttttcagctaatgtgaggattcggtgagacagtccatgtaaagcaagtgctcaacatgtgttggctatgaatagtaatagtggtgtcacagcctcaggtgaaattggtcttagcttttggttctgttctatttgacagggtttctcatcaacagtctatgagctgtctaaagtaaatttagtagcttcctcttttttctatgttatagaacagtgtgtattgcatgagaaatagaaattgcttgaatattagaaaaaaaaatccctcaaaagatcatctaagcctttttagaagtaattctctctctccctcttattttttttttgttcattcattgtgactgatagattctgttttttgtttgttttgtttgttttgttttgttttttgagatagagtctctgctctgtcacccaggctggagtgcagtggtgctatctcagctcactacgacctccaactcccgagttcaagttcacgtgattctcctgcctcagcctcccgagtagctgggattacaggcacatgtcaccatgcctggctagtattcatatttttgactggcatttggtaacttataatctgtactttactgaaaataattatatagagtttttgttttaacattccctttgtttatattgctgtaacctctttttcacatataactttactttggggtgctttttcttacatgtggtgggtggctgtctgttttgtatgtatgtgtgttttcttttaaagaaccagctcttggattcattgatcattttgtgtttgtcccaaaattccttgggagtttttctgtatcttttctaacataatgattttaaagttttagcattttattactttcttggtaatattgaaaacaatgctatgttttaacttatctttggccaaactctttggtctaatatatatcacccatattttgattattttctaaatcatatgtcatatacttatttagaagaatttgtttgtttgtttgttttttgagaaggagtcttgctctgttgcccaggctggagtgcagtggtatgaccttggctcactgcaacttccgcctcctgggttcaagtgattctcctgcctcagcctcccaagtagctgggattaccagcaagcatcaccacacccggctaattttcgtatttttagtagagacaggatttcgccatcttggccaggctggtcttgaactcctgacctcaagtgatctgcccgcctcggccccccaaagtgctgggattacaggcatgagccactgtgcccagcctagaagaatattttaaatatttgtttagaagaggattttttgtgttttttttttttttttgacatggtcttgctctgtctcctaggctggagtgcagcagcttgatcatagctcactgcagcctcaaagtcctgggctccagcaatcctcccatctcagccttccaagtagctgggaccacaggcacacaccatcatgcccagctaagtggagatgggatcttgcaatgttgcccaggctagcctcaaactcttgggctcaaacaatcctcctgccttggcctccaaaagtgctgggattataggcatgagccactgtgcctggcctagaaaagtattttaatttttactttgaagagttaattatttagaaaagtgttttcagtaatattttgtaggtgattttcattttgttggcattttatttataatgctgattttttgttactacattgaagttagagaatatgatctatataattctgtatttcagaatgtattgggatgttgagacttttcttatggcccaatatgtgtgatatattttgaaatatttaatatacacacatgtagtccctatagggtacaattttaataactgtgttattgtcttattaatcacattgctcatgtaatatccttgtttccttttgaggattctgatgattgtatttccgtctatttttccatgcattttttctgcttttaactttttaactgcatctttttttttcactataaattttagaggtaattttcccaccacttagggtacatttatattttccttttgatgcaagattttatcacaacctcttttctgagcttttctcacccttgtcattttttgtgtgttactgatctttaaacaagcgagatccattcaggcagaatggctacatcttttactcgcctgttttctgtcccctctctctcctctccccagccatcaaagagctatcttgataacttttaaaattatctttcacaacaggcactgtctttaaacacagaggaagacattcatcgggctttccagtcgcttctcactgaagtgaacaaggctggcacacagtacctgctgagaacggccaacaggctctttggagagaaaacttgtcagttcctctcagtaagttgaatcaatagaacaataaaagttgcattcaacatacctggtgatatagagtctgggagaaagaccctagagaaattgagaaatttatgttaaccaatttaaaaaaattgcactatttttttttctaagatggggtctcactacgttgcccaggctggtcttaaactcctggtctcaagtgatcctcctgcctgttgggattacagatgtgagccaccacgcccagcctaaacttctttttttttttaaagactgcaattctataattataccttgcattagtattgcaaaagtagtctctacttttcttgaaaggtaaaattgaaaggtaaaattctcaagttcatttctggttattcagggttcaatacatacctattcacaaactctgatattttaacatatcttcatatgatcacttttaaagagttatgtatattctttttattaaaaaaagataacatatttagaatttttggaagtttgctgacatttgtatttagcaatgcagcctcactgaacatttttctctccaaagacgtttaaggaatcctgtcttcaattctaccatgctgagctgaaggagctttcctttatcagagctgcagaagagtccaggaaacacatcaacacctgggtctcaaaaaagaccgaaggtcagaatgacaagttattgcaccttcctcccaacccgtcctcctcctgcggctcttcctattcctccttcccgcctcttatatcctctctcctcctcctctccctcctatccctcctccctctcctcacccacctccacctttccactccgccccctctaatttcacgggtgtttcagatggtcagagtagtgttgactggcagggcctcctggcatactgaaccttgatggactcataaaggttctgatcagacattcaggttttcagcaacagagatttacttttgtctattctcccaggaccagagtagctgatacaaatgtcaaaagagggccagccacggtggctctcgcctgtaatcccagcaatttataaggccgaagtggacatatcacttgaggtcaggagttcgagaccagcatgaccaacatgggtggacccccccccgcccaacatatttactaaaaatacaaaaattagccaggtgtggtggcccatgcctgtaatcccagctgcttgggaggctgagacatgagaatcacttgaacctgggaggcagaagttgtagtgagctgagatcatgccactgaactccagcctgtctcaaaaacaaaaaccaaacaaaaaacacaaatgtcaaaagaatctcaggccaggtttccagtttaataacttgcattaaaatatactctccctggcctgtaacattcacatgtcaggtgactccattgtctctgcgagaaggagattggtggacagatcttgcctgaggtatacacttgggctgcctcttcctaggttctgggggacctccatcaccattacctttacctgctaaggtcactcctgacttttcatgtcttccacttaagctcctttagtttgacttgataagcctacatttgattggttaactgccgaccctctctcagggctgatcagttccacagactgaaaataccctccatttggggttgaaccttattcatctacatttcagaaagtgacgtgttccagtctaggcctccaagaccaatgatggtctgatgaaccattcagactcctctgcgccaattatgcttagtaccaccaggaacatttccatttctgtgaataaatgagacggtaaagaatgggagacgttcttcgcttaaagtctcagcagttgtttcccgcattcctgcttggagtatttaccacggatgctctcttcaggcagtgggttagcagggatgccctcagttcattgaaacagtaccacttgatctccagggaaagaaggggtgatctttgtttgcccacatcctcttttccagggatgcctagtgctttgttgaggggattcagcaggaatatctcctccaaaagcttctggaaactccccatgtgcccaatgtcagctcttcccgctttgagccgtccattctggttgcttctgacatgtccatgtatagtcacagaatgttagaactgggtgtgatcatgaagggttggatcaaacactccaattaaccatgtgagacaaacaccccttcagcctatcacatttcctgctggtcttgttctccaacctggtgtaatttttctactttgtaccaacctgctttcctcgagtgacttaggtatctttcaccatcctcaacttggtggatgttctcaaggtgtcagtaatcatgaataccactcatatgtgctgtttttatttctctacataacaacccaaactcagcaaagttgaaaacagaagtttgcttctcaactaatgatccaggatcatccaatgcatcaggttcttataaaaagcaactgaatgtagtctctacttttcttgaaaggtaaaattgaagagttgttgccgggtagctcaattgatgcagaaaccaggctggttcttgtcaatgccatctacttcaaaggaaagtggaatgaaccgtttgacgaaacatacacaagggaaatgccctttaaaataaaccaggtgggggaagctttttaaaatcctgctagtttgatgaagaagttgaatggaaagatttaactttgtaaaagtgtaagtgacataagcgtaagccaaaaggaatttgaaacttaaagtatttctgaatgaatttcttaactcagtagaaaaaaacggaaggagtaaaagatatttgctgcatatatatattatatatacgtatatataatatatatatatatatgtagtgttttatcactgctcttaactgcctttgataatttctcataaaccattgctgccacctagttttggaaactaaagatcttcctataagcccaatttacttggctagaaagcaaaaaaaaaaaaaaaaaagtgttaaggtagtgtgatatgtgggagtgagaggcagtatagggcagggtagagggagagaaggtgaaaacatgtgtctttaattagttatttttaaaattaaagtaagttttatttgaattgttaactaattatcattaattcagtattacaggcttttaatattaaaacttcatgacaaagaccttagttttgacattgaagtaaaacttaattaaggcaggcattagaataatttgccaaatcttccagcccctaaaaagatactattttaatgtaattaaaaaacaaaagcaggtaaccctcctgcattttttgtaaggtgtactttaacttaaaaaaattagttctctagttgcaaagggtgggaggaggagaattctaaccctggttttagaactattttaatttttataataaatgatctgtatcaattttttaaagtattacgttaataaatgtaatactttgctgagcttctatgtgcttatgcctcttctgtattttaaaaaagttatttcattagagtatcagaattgaaaagattgggttaaaatacattactacatatgtaggtcgttactctttctgagagagtgtatccatttatactccctgtcatgctgttgtggaactataagtttcatcccactttatgattttttttctcatatgttgggttggataaataggaaaaacaatacacatttttttctaattaaatcaaaacaaatttgtatttaatttcatttgattatattgctttcttagatctatttgctgagcacaatttaaatgagaaacatctttctcctctggaaaatgtagggtatcacattttattttgcagaagaaaacctttcccagggtggtactgtgtctgcttgcaatgaagataggaaggaactggttgactttttttttttttttttttttttttttttttagtgttaactggggcatgaatgtggcggtttccatcacaggtgctgaaaacactcttggaggcaactgcagctcttttgaaagttttaattgcgtctttcaataatccttcccccaggaggagcaaaggccagtgcagatgatgtatcaggaggccacgtttaagctcgcccacgtgggcgaggtgcgcgcgcagctgctggagctgccctacgccaggaaggagctgagcctgctggtgctgctgcctgacgacggcgtggagctcagcacggtaagacccgggctgcgggaagaacccagggacacctttgcgggcagaactcgagtgccacttccacctctcatattcaccttctgagttggcgatgcggcagacgcacactgtgcaggcacttggcgttgggatcgaacttttgttcaaggctgacttttcccaatattgtctgcgtgatctgccaaactacacatctcagtcctctgttttttcatcgctagaaggagtgggcggcggttaaaatgccttttaaaataaatcaggtaggaggaagcttataaaaatcctgctagtttgatgaatggcagacttttaactctaaaagcataaatgactgctcggggttattgcctcctagagttatgatgaggataaaatgtgggtaattcaggtaacaagcttaccacattgcctggcaactagtaaatgctctacaaatgtgatccattattacaatcatcattcttagcattatgcttttaaagtctaggaacctgaaatagagaatgaggaagtcttaactttgacctaacaaggctgggagggggcatccagggaggtgtgaagtccagttctcagagggtgggaccagaggcagcctctgagggcacatccaggcactcggcttcctttcagcatggatctccagggtgagagagtcaaccatggcaaatggcaggcagtgggaccccatgacttaagaggtctgtgtgcgcagcagccattggctctccctctgcccaccttcctgaaactatgctccggaaactatgcagaatctctctggggcagataatcctctggtaacctctctgctccggaaactatgcagaatctcacctgggacagataatcctgttggagtggctcacactgagagccctttcgtttccaatccttttctttactagcaatggtttgttgtctttaaaaagactatgtttgaaaaaaaaacacagtcgcctgggcattgacacttgtcacaatacaagatgtctctggagttgttggataaggagaggacagccacagccttcctgcctctgactgcttggtgtctctcccccttgtcaaggaagtggcacatgggacataggacaagtaagagtgctcacaagcttctggcagatgaaggggccactgatcctatgtgaacaaacaacacctacgtgcaaggggaggaagggaactgtgagtgcctgtgcgcttgtacatgtgcactgaagtcggaatcttaaagtctaattctggtctttcaggtggaaaaaagtctcacttttgagaaactcacagcctggaccaagccagactgtatgaagagtactgaggttgaagttctccttccaaaatttaaactacaagaggattatgacatggaatctgtgcttcggcatttgggaattgttgatgccttccaacagggcaaggctgacttgtcggcaatgtcagcggagagagacctgtgtctgtccaagttcgtgcacaagagttttgtggaggtgaatgaagaaggcaccgaggcagcggcagcgtcgagctgctttgtagttgcagagtgctgcatggaatctggccccaggttctgtgctgaccaccctttccttttcttcatcaggcacaacagagccaacagcattctgttctgtggcaggttctcatcgccataaagggtgcacttaccgtgcactcggccatttccctcttcctgtgtccccagatccccactacagctccaagaggatgggcctagaaagccaagtgcaaagatgagggcagattctttacctgtctgccctcatgatttgccagcatgaattcatgatgctccacactcgcttatgctacttaatcagaatcttgagaaaatagaccataatgattccctgttgtattaaaattgcagtccaaatcccataggatggcaagcaaagttcttctagaattccacatgcaattcactctggcgaccctgtgctttcctgacactgcgaatacattccttaacccgctgcctcagtggtaataaatggtgctagatattgctactattttatagatttcctggtgcttagccttataaaaaaggttgtaaaatgtacatttatattttatcttttttttttttttttttctgagacgcagtctggctctctgtcgcccaggctggagtgcagtggctcgatctcggctcactgcaagctccgcctcccgggttcacgccattctcctgcctcagcctcccgagtagctgggactacaggcgcccgccaccacgcccggctaattttttgtatttttagtagagacggggtttcaccgtgttagccaggatggtgtcgatctcctgacctcgtgatccacccgcctcggcctcccaaagtgctgggattacaggcttgagccaccgcgcccggctatattttatcttttatctttttctttgacatttaccaatcaccaagcatgcaccaaacactgctttaggcactggggacacaaaggggacagagccatcctcctttgacacctggtcttcagttctgtgcccaacgtatatagttttgacaatgaccaggttggactgtttaatgtctttcaacttaccacgtaatcctcttgtagggatcacatctttctttatgatattgtatttctctacctctaacagtaaaaattccattcaacccttaaagctcacttcaaattcttctttgagaagtttttcctttctccgcaaccagatgtacatatttgaactctctttgtacttggagggcacttctttcgtggtagttcttttatttttattaatctctgtatccttagatagtcctccaacaaccaaaggttgggactctgtcttacatatctgggtgcccctcatagtgcagtaataagtaagttgattatatacgagctatgtaacttatattttttaatggttggatatcactgagtttttttttttaagaatttttttattgaggtaaacttcacataacataaaattaactattttaaagtgagaagttcagtgccacttagtattgttaacaatgttgcataaccaccacctttatttaaagttccaaaaaaaatgttctcctctaaaaggaaaccccatcccattaagcagatactctccattccttccttcctccagcccccagcaaccaccaatctgctttctgtctctatggatttatctattcttgctattttatataaattgaattgtatgagaccttttgtgtctggcttctttcacttagtacaagtttttgagatttatttacatagtagcatgtatcaacacttcatttttatggccaaataaaattgtattatgtgtttatagcacaatttatttatccactcattcattgatggactttgggttgtttctgacttttggctattgggaatagtgctgctatgaatgtttgtgtacctgtatttgtttgaatgcctattttgcattctcttgggtatatatctaggagtggaactgctgggtcatatgttaattctatgtttagctttttgaggaacagacaaactgttttccacagcagttgaaccattccacattcccaccagcaatgtatgagaattccaatttctgtccacttcctcaccaacacttattattttccttttcctttttttaaaaaaaataagttatggccatcttagtgggtgtgaagtggtatctcattgtgttttttatttgcatttcctatgtaatgagctagaaactaaagtacaaactagatgggacatccagtccctttgatagataatgctgagtaaaaaatgagatgaaagacatttgtttgtttttagaacacgagtgacagtttgttaaaaagctttagaggaggaatgaaaacaaagtgaagtacacttagaaaagggccaagtggacatcttggatgtcaagtgcctagttcagtatcttttttttttttttttttttttttgagacagtgcctcactctgtcacccaggctggagtgtagtggcatgatctgggctcactgcaacctcctcctcctggattcaagcaattctcttgcttcagcctcccaagtagctgagactacaagcacccaccatcacacccagctaattttgtatttttcagtagagacggggtttcgccacattggccgtgttggtcttgaactcctggcctcaagcgatccgcctacctcagcctcccaaagtgctaggattacaggcataagccactgagcccagccctagttcagtatcttttatgtaaattacaaacatctgcaacattatgtatcatatgcagatacttattgcatttcttttattagtggtgaaagtgttctatgcatttattggctcttgaatttcctcatctatgaattgtcattcatacacctacttttctgcttcgtttttacatatgtctttgcctattaaagatattatccctctgttttatattttctctcattcttgtattgccttttaaattttgttatgatgtttcattaataaacagtgttttgttttcctctataatcaaa

SEQ ID NO: 1771 - DNA, 16107 bp, Homo sapiens
cgcggcgagcgcagcagcagggccgggtcctgcgcctcgggggtcggcgtccaggctcggagcgcggcacggagacggcggcagcgctggactaggtggcaggtgagggcgtccccgcgcacggctggggtaggggacgggagtggcgagcttcaggtccaccggctgccaccgagtgatgggaccggaggacaggagaggtcgctcagccaagagccccggggaggcggtgccttctcggtggggtcagcaacggtctctggggggtgcctgggagcggcagccggtctccgccttggcggcccacagccaccgcggacgcctccctcccggatgtctcctcgctgcccttccctggccgaagccctcccctgcagcctcctccccacctgccggccctgtgttctcactgctcttctctgctctgggatccgcaggatgacgtctgtcctgcttcttcactgtcctttacagtcaccagtctcggccgggcgcagtggctcacgcctgtaatcccagcactttgggaggccaaggcggtcggatccttggagatcaggagttcgagaccagtctggcaaacgtggtgaaaaccggtctctactaaaaatacagaaattagccgggcatggtggcccacgcctgtaataatgtcagctatgtgctgaggcaggaaaatcacttcaactcgggaggcagaggttgcagtgagctgggattgcgccactgcactccagcctggcagacagagtgagacttcgtctcaaaacaaaaaaaagaaaaacacaaaaaaaccaccaccaacaacaacaaaaaaataaagccaccagtctcggagtttcaaatctgagcactcttatccatcttaattctttcaataattcagctaaacgaatggggtcctgagaatctgcagagccaggctcagcgctcgcctgcagagcctgcggtctgtggggaccaccagcaagatgaggaatcaccttcgggaggaagggtcgtgctggggagggtcgcgccggcggggtcaagagaacctcctccagggtgggaatcagagcctccgggccgcggtgtttgagggtgagtggaattaatgccgtgatggacatggggccttctaagggggaccaacagtgtttgtgaagagttgactttgggaggggttcaggatggccagaggtggaggctgtgacctcagtgaggctggatcaagggagggggcaggtgggtaagacaccgttttaacaaggtggctttgagcggccacctttgaggggcctaagggcccctgggagatttaggaggaaggacaagaggattaagacaccgctttctgaggtgccgtgtggctgtggcgtgggggtggctgggggagtgggttgtgttcattgtccaaggctctccagcgctttgcgtggcgttttggggagcacagatgaggtgtcccgacagtggggagtggctctagggagaccagaggctcgggagggggcctgggcattagaccaggcacagaatccgaagtgggaagaaatgtgggcgtagagggcaggccttggggatgggtgtgggggaggagggggagatggaaaggagtcagggaggtctcccaggctcacctggaggagtcagggtctcatttccaagtgcactgggaactgcagcctgggggtgggggttcatttggtttcaggcctgtggccaagagacccaccccctcacattcacactttggtctccagtggcttcacaggcaccacctccttgttctcgcctgttttactcctcaccttgggctgtttcttgcctttccattctggcgttctgcagggatcagatccttcctctcacgcacaatctacactcatggcttttgctgggagtaatgagtaaagctcccaaatagatgtttctgagttaggaagcacattaaaaacaaaacaaaacgaagcaaaaccacacaattgtccaagtcccactctgtgttcaagggtcacatgatgtgcagaagctggtgatgggcaggagctctgaatggagttactgggatgtcaggccgcgtgggcctggggcaggctggctgactgggagcagcctggctccaccccggctgtccaggacgcactcacttgcctctatggatgacagctccttgcctcacagctgtctgtctctgggtcagattcagcatctcagtgtcttttgtgtatcagctgaatgtcagggaggccacaggctggtgcccagttgaaaatctcacaaggactctttgtaaatgcatgcaagaataagaacagcattttcctcctcctccctgaccccattctcctcctcagatgggacgatctggtccttacggaaagaattggagttcactgcttccagctctgtgtgtgtgtgtgtgtgtgtgtgtgtgtgtgtgtgtgtgtgtgagagagagcgagctctgcaggcgagccagttctgttgctattgctggtttgagctgctgccatcaccacacttagctaattaccttaacatttgcacttaatttttggccggagactaacagaaaataaatttttctccaatttaaaatacttacgaactttaagaagaaaacaaaaagtacgattccaaaattgccctgtagtaagtaggtcagtaacattcagggagtgtggaaactgcatttctctttattcttcccttccaggccctgcatcatggaaactctttctaatgcaagtggtacttttgccatacgccttttaaagatactgtgtcaagataacccttcgcacaacgtgttctgttctcctgtgagcatctcctctgccctggccatggttctcctaggggcaaagggaaacaccgcaacccagatggcccaggtaagcttgcccgtccgccaggagcagggactggcctgggctgcgtgttctgtcaccagcttcacactcacactccagagccactgagaaaggagggcaggactggggcccgagtgtgcactggccgtttcagggaggcggggtccactggggaagaagtggggcagggcagggaggcaggaactctgctccaccgagatttatttgggggaaactttcctcggttaatcccttggaaaagaccatccaagctgtcttgtcctagcgcagaatctttctttagaaaatgacactgaaattatttgaaacataagttgcaaagaactacctcttttttggagcaagagactttgtaactaaactttcattggtaaggaaggttaatacctgtttcaagttgtttctgtaccaacagctcagggagggcatcaacagaaatttgcaagaaggattccagggcaagtgcttcattacagctgcacactgtgcaggtactgctcagctcagtctcaccaacattcagagaacctgtggaaatgattcaagatcagtgcttgtccccagacctttgtggaaaggagaggagacatacacgtgagatgaaaccgaaaagcgccatccctgagtgcaggccgctggacacgccttcatcatgggagttgtcctttgttcaatatgactgtctttttctttgatgacgcttttcaatagtgaattactcattttaataatttcccagctcattgtgtgaagaagggagggtttatgtgtaaaggctaccagccttaataataagcacagagaggctctctaaaagatatatatatttggaaatagggcattgcaatgaaaatacgcatgccatggcaagctatgtgcacattcagggaggtgaaataacactaagatttttaaaggaaaaagtaaagaggattacataattcctttgaaataattatttttggcaaaaagatcaataacgaaggtgatgtcagtgtgaggttggatggggagttcctgggtagatgtccttgcacaagtattttgttgtgtaaggctgtgatggcctttgtgcaagagcgtaggtttttagagtcctttgtgatagttgtgttatcaggcattcaagcgtgagaaccctctcttcatggccttccctgtctgtttgtcaaaggtttttggttttgtttttttaatattagtgactccattttgattctgaagttccttatgctgaaatctgtatgatctttttctatgttttaggctcactgataaacccttatagaaagcttttttgagagcaccaaaattgtctgggtaccttcttaggtgtgagactgagctctctccatggctccagtgttcaactggatgcttgtgagacaccaaacatactgagtacacgttgctacctgtaacatgcagggaagcgttaatggcagcagaaatattttaaagaattatttatttttccttcattatataactggtaaaagtccactataaaaatttttaaaaaataaaagtagaagggaggaaaaaatccctatgaatccatcaaacagagacaaccacccttgataatgtaaagcatcttcctccagtcctatttctttttttttttttcgagacagagtcttgctctgtcgcccaggctggagtgcagtggtgcgatctcagcttactgcaagctccaccccccgagttcacaccattcttccacctcagcctcccgagtagctgggactacaggtgcccgcccccacgcccagctaatttttatttttagtagagacagggtttcactgtgttagtcaggatggtctcgatcacctgacctcgtgatccacccgccttggcctcccaaagtgctgggattacaggcgtgagccactgcgcccggccctatttcctgattttcacttgacattttgtactttggtgattatatggtatctttacttttataaatgatttttcagctaatgtgaggattcggtgagacagtccatgtaaagcaagtgctcaacatgtgttggctatgaatagtaatagtggtgtcacagcctcaggtgaaactggtcttagcttttggttctgttctatttgacagggtttctcatcaacagtctatgagctgtctaaagtaaatttagtagcttcctcttttttctatgttatagaacagtgtgtattgcatgagaaatagaaattgcttgaatattagaaaaaaaaatccctcaaaagatcatctaagcctttttagaagtaattctctctctccctcttattttttttttgttcattcattgtgactgatagattctgttttttgtttgttttgtttgttttgttttgttttttgagatagagtatctgctctgtcacccaggctggagtgcagtggtgctatctcagctcactacgacctccaactcccgagttcaagttcacgtgattctcctgcctcagcctcccgagtagctgggattacaggcacatgtcaccatgcctggctagtattcatatttttgactggcatttggtaacttataatctgtactttactgaaaataattatatagagtttttgttttaacattccctttgtttatattgctgtaacctctttttcacatataactttactttggggtgctttttcttacatgtggtgggtggctgtctgttttgtatgtatgtgtgttttcttttaaagaaccagctcttggattcattgatcattttgtgtttgtcccaaaattccttgggagtttttctgtatcttttctaacataatgattttaaagttttagcattttattactttcttggtaatattgaaaacaatgctatgttttaacttatctttggccaaactctttggtctaatatatatcacccatattttgattattttctaaatcatatgtcatatacttatttagaagaatttgtttgtttgtttgttttttgagaaggagtcttgctctgttgcccaggctggagtgcagtggtatgaccttggctcactgcaacttccgcctcctgggttcaagtgattctcctgcctcagcctcccaagtagctgggattaccagcaagcatcaccacacccggctaattttcgtatttttagtagagacaggatttcgccatcttggccaggctggtcttgaactcctgacctcaagtgatctgcccgcctcggccccccaaagtgctgggattacaggcatgagccactgtgcccagcctagaagaatattttaaatatttgtttagaagaggattttttgtgttttttttttttttttgacatggtcttgctctgtctcctaggctggagtgcagcagcttgatcatagctcactgcagcctcaaagtcctgggctccagcaatcctcccatctcagccttccaagtagctgggaccacaggcacacaccatcatgcccagctaagtggagatgggatcttgcaatgttgcccaggctagcctcaaactcttgggctcaaacaatcctcctgccttggcctccaaaagtgctgggattataggcatgagccactgtgcctggcctagaaaagtattttaatttttactttgaagagttaattatttagaaaagtgttttcagtaatattttgtaggtgattttcattttgttggcattttatttataatgctgattttttgttactacattgaagttagagaatatgatctatataattctgtatttcagaatgtattgggatgttgagacttttcttatggcccaatatgtgtgatatattttgaaatatttaatatacacacatgtagtccctatagggtacaattttaataactgtgttattgtcttattaatcacattgctcatgtaatatccttgtttccttttgaggattctgatgattgtatttccgtctatttttccatgcattttttctgcttttaactttttaactgcatctttttttttcactataaattttagaggtaattttcccaccacttagggtacatttatattttccttttgatgcaagattttatcacaacctcttttctgagcttttctcacccttgtcattttttgtgtgttactgatctttaaacaagcgagatccattcaggcagaatggctacatcttttactcgcctgttttctgtcccctctctctcctctccccagccatcaaagagctatcttgataacttttaaaattatctttcacaacaggcactgtctttaaacacagaggaagacattcatcgggctttccagtcgcttctcactgaagtgaacaaggctggcacacagtacctgctgagaacggccaacaggctctttggagagaaaacttgtcagttcctctcagtaagttgaatcaatagaacaataaaagttgcattcaacatacctggtgatatagagtctgggagaaagaccctagagaaattgagaaatttatgttaaccaatttaaaaaaattgcactatttttttttctaagatggggtctcactacgttgcccaggctggtcttaaactcctggtctcaagtgatcctcctgcctgttgggattacagatgtgagccaccacgcccagcctaaacttctttttttttttaaagactgcaattctataattataccttgcattagtattgcaaaagtagtctctacttttcttgaaaggtaaaattgaaaggtaaaattctcaagttcatttctggttattcagggttcaatacatacctattcacaaactctgatattttaacatatcttcatatgatcacttttaaagagttatgtatattctttttattaaaaaaagataacatatttagaatttttggaagtttgctgacatttgtatttagcaatgcagcctcactgaacatttttctctccaaagacgtttaaggaatcctgtcttcaattctaccatgctgagctgaaggagctttcctttatcagagctgcagaagagtccaggaaacacatcaacacctgggtctcaaaaaagaccgaaggtcagaatgacaagttattgcaccttcctcccaacccgtcctcctcctgcggctcttcctattcctccttcccgcctcttatatcctctctcctcctcctctccctcctatccctcctccctctcctcacccacctccacctctccactccgccccctctaatttcacgggtgtttcagatggtcagagtagtgttgactggcagggcctcctggcatactgaaccttgatggactcataaaggttctgatcagacattcaggttttcagcaacagagatttacttttgtctattctcccaggaccagagtagctgatacaaatgtcaaaagagggccagccacggtggctctcgcctgtaatcccagcaatttagaaggccgaagtggacatatcacttgaggtcaggagttcgagaccagcctgaccaacatggtgggaccccccccccccaacatctctactaaaaatacaaaaattagccaggtgtggtggcccatgcctgtaatcccagctgcttgggaggctgagacatgagaatcacttgaacctgggaggcagaagttgtagtgagctgagatcatgccactgaactccagcctgtctcaaaaacaaaaaacaaacaaaaaaacaaatgtcaaaagaatctcaggccaggtttccagtttaataacttgcattaaaatatactctccctggcctgtaacattcacatgtcaggtgactccattgtctctgcgagaaggagattggtggacagatcttgcctgaggtatacacttgggctgcctcttcctaggttctgggggacctccatcaccattacctttacctgctaaggtcactcctgacttttcatgtcttccacttaagctcctttagtttgacttgataagcctacatttgattggttaactgccgaccctctctcagggctgatcagttccacagactgaaaataccctccatttggggttgaaccttattcatctacatttcagaaagtgacgtgttccagtctaggcctccaagaccaatgatggtctgatgaaccattcagactcctctgcgccaattatgcttagtaccaccaggaacatttccatttctgtgaataaatgagacggtaaagaatgggagacgttcttcgcttaaagtctcagcagttgtttcccgcattcctgcttggagtatttaccacggatgctctcttcaggcagtgggttagcagggatgccctcagttcattgaaacagtaccacttgatctccagggaaagaaggggtgatctttgtttgcccacatcctcttttccagggatgcctagtgctttgttgaggggattcagcaggaatatctcctccaaaagcttctggaaactccccatgtgcccaatgtcagctcttcccgctttgagccgtccattctggttgcttctgacatgtccatgtatagtcacagaatgttagaactgggtgtgatcatgaagggttggatcaaacactccaattaaccatgtgagacaaacaccccttcagcctatcacatttcctgctggtcttgttctccaacctggtgtaatttttctactttgtaccaacctgctttcctcgagtgacttaggtatctttcaccatcctcaacttggtggatgttctcaaggtgtcagtaatcatgaataccactcatatgtgctgtttttatttctctacataacaacccaaactcagcaaagttgaaaacagaagtttgcttctcaactaatgatccaggatcatccaatgcatcaggttcttataaaaagcaactgaatgtagtctctacttttcttgaaaggtaaaattgaagagttgttgccgggtagctcaattgatgcagaaaccaggctggttcttgtcaatgccatctacttcaaaggaaagtggaatgaaccgtttgacgaaacatacacaagggaaatgccctttaaaataaaccaggtgggggaagctttttaaaatcctgctagtttgatgaagaagttgaatggaaagatttaactttgtaaaagtgtaagtgacataagcgtaagccaaaaggaatttgaaacttaaagtatttctgaatgaatttcttaactcagtagaaaaaaacggaaggagtaaaagatatttgctgcatatatatattatatatacgtatatataatatatatatattatatatacgtatatatatatattatatatatatacgtatatataatatatatatatatatgtagtgttttatcactgctcttaactgcctttgataatttctcataaaccattgctgccacctagttttggaaactaaagatcttcctataagcccaatttacttggctagaaagcaaaaaaaaaaaaaaaaagtgttaaggtagtgtgatatgtgggagtgagaggcagtatagggcagggtagagggagagaaggtgaaaacatgtgtctttaattagttatttttaaaattaaagtaagttttgatttgaattgttaactaattatcattaattcagtatttacagctttttaatattaaaacttcatgacaaagaccttagttttgacattgaagtaaaacttaattaaggcaggcattagaataatttgccaaatcttccagcccctaaaaagatactattttaatgcaattaaaaaacaaaagcaggtaaccctcctgcattttttgtaaggtgtactttaacttaaaaaaattagttctctagttgcaaagggtgggaggaggagaattctaaccctggttttagaactattttaatttttataataaatgatctgtatcaattttttaaagtattacattaataaatgtaatactttgctgagcttctatgtgcttatgcctcttctgtattttaaaaaagttatttcattagagtatcagaattgaaaagattgggttaaaatacattactacatatgtaggtcgttactctttctgagagagtgtatccatttatactccctgtcatgctgttgtggaactataagtttcatcccactttatgattttttttctcatatgttgggttggataaataggaaaaacaatacacatttttttctaattaaatcaaaacaaatttgtatttaatttcatttgattatattgctttcttagatctatttgctgagcacaatttaaatgagaaacatctttctcctctggaaaatgtagggtatcacattttattttgcagaagaaaacctttcccagggtggtactgtgtctgcttgcaatgaagataggaaggaactggttgactttttttttttttttttttttttttagtgttaactggggcatgaatgtggcggtttccatcacaggtgctgaaaacactcttggaggcaactgcagctcttttgaaagttttaattgcgtctttcaataatccttcccccaggaggagcaaaggccagtgcagatgatgtatcaggaggccacgtttaagctcgcccacgtgggcgaggtgcgcgcgcagctgctggagctgccctacgccaggaaggagctgagcctgctggtgctgctgcctgacgacggcgtggagctcagcacggtaagacccgggctgcgggaagaacccagggacacctttgcgggcagaactcgagtgccacttccacctctcatattcaccttctgagttggcgatgcggcagacgcacactgtgcaggcacttggcgttgggatcgaacttttgttcaaggctgacttttcccaatattgtctgcgtgatctgccaaactacacatctcagtcctctgttttttcatcgctagaaggagtgggcggcggttaaaatgccttttaaaataaatcaggtaggaggaagcttataaaaatcctgctagtttgatgaatggcagacttttaactctaaaagcataaatgactgctcggggttattgcctcctagagttatgatgaggataaaatgtgggtaattcaggtaacaagcttaccacattgcctggcaactagtaaatgctctacaaatgtgatccattattacaatcatcattcttagcattatgcttttaaagtctaggaacctgaaatagagaatgaggaagtcttaactttgacctaacaaggctgggagggggcatccagggaggtgtgaagtccagttctcagagggtgggaccagaggcagcctctgagggcacatccaggcactcggcttcctttcagcatggatctccagggtgagagagtcaaccatggcaaatggcaggcagtgggaccccatgacttaagaggtctgtgtgcgcagcagccattggctctccctctgcccaccttcctgaaactatgctccggaaactatgcagaatctctctggggcagataatcctctggtaacctctctgctccggaaactatgcagaatctcacctgggacagataatcctgttggagtggctcacactgagagccctttcgtttccaatccttttctttactagcaatggtttgttgtctttaaaaagactatgtttgaaaaaaaaacacagtcgcctgggcattgacacttgtcacaatacaagatgtctctggagttgttggataaggagaggacagccacagccttcctgcctctgagtgcttggtgtctctcccccttgtcaaggaagtggcacatgggacataggacaagtaagagtgctcacaagcttctggcagatgaaggggccactgatcctatgtgaacaaacaacacctacgtgcaaggggaggaagggaactgtgagtgcctgtgcgcttgtacatgtgcactgaagtcggaatcttaaagtctaattctggtctttcaggtggaaaaaagtctcacttttgagaaactcacagcctggaccaagccagactgtatgaagagtactgaggttgaagttctccttccaaaatttaaactacaagaggattatgacatggaatctgtgcttcggcatttgggaattgttgatgccttccaacagggcaaggctgacttgtcggcaatgtcagcggagagagacctgtgtctgtccaagttcgtgcacaagagttttgtggaggtgaatgaagaaggcaccgaggcagcggcagcgtcgagctgctttgtagttgcagagtgctgcatggaatctggccccaggttctgtgctgaccaccctttccttttcttcatcaggcacaacagagccaacagcattctgttctgtggcaggttctcatcgccataaagggtgcacttaccgtgcactcggccatttccctcttcctgtgtccccagatccccactacagctccaagaggatgggcctagaaagccaagtgcaaagatgagggcagattccttacctgtctgccctcatgatttgccagcatgaattcatgatgctccacactcgcttatgctacttaatcagaatcttgagaaaatagaccataatgattccctgttgtattaaaattgcagtcccaatcccataggatggcaagcaaagttcttctagaattccacatgcaattcactctggcgaccctgtgctttcctgacactgcgaatacattccttaacccgctgcctcagtggtaataaatggtgctagatattgctactattttatagatttcctggtgcttagccttataaaaaaggttgtaaaatgtacatttatattttatcttttttttttttttttttctgagacgcagtctggctctctgtcgcccaggctggagtgcagtggctcgatctctgctcactgcaagctccgcctcccgggttcacgccattctcctgcctcagcctcccgagtagctgggactacaggcgcccgccaccacgcccggctaattttttgtatttttagtagagacggggtttcaccgtgttagccaggatggtgtcgatctcctgacctcgtgatccacccgcctcagcctcccaaagtgctgggattacaggcttgagccaccgcgcccggctatattttatcttttatctttttctttgacatttaccaatcaccaagcatgcaccaaacactgctttaggcactggggacacaaaggggacagagccatcctcctttgacacctggtcttcagttctgtgcccaacgtatatagttttgacaatgaccaggttggactgtttaatgtctttcaacttaccacgtaatcctcttgtagggatcacatctttctttatgatattgtatttctctacctctaacagtaaaaattccattcaacccttaaagctcacttcaaattcttctttgagaagtttttcctttctccgcaaccagatgtacatatttgaactctctttgtacttggagggcacttctttcgtggtagttcttttatttttattaatctctgtatccttagatagtcctccaacaaccaaaggttgggactctgtcttacatatctgggtgcccctcatagtgcagtaataagtaagttgattatatacgagctatgtaacttatattttttaatggttggatatcactgagtttttttttttaagaatttttttattgaggtaaacttcacataacataaaattaactattttaaagtgagaagttcagtgccacttagtattgttaacaatgttgcataaccaccacctttatttaaagttccaaaaaaaatgttctcctctaaaaggaaaccccatcccattaagcagatactctccattccttccttcctccagcccccagcaaccaccaatctgctttctgtctctatggttttatctattcttgctattttatataaatcgaattgtatgagaccttttgtgtctggcttctttcacttagtacaagtttttgagatttatttacatagtagcatgtatcaacacttcatttttatggccaaataaaattgtattatgtgtttatagcacaatttatttatccactcattcattgatggactttgggttgtttctgacttttggctattgggaatagtgctgctatgaatgtttgtgtacctgtatttgtttgaatgcctattttgcattctcttgggtatatatctaggagtggaactgctgggtcatatgttaattctatgtttagctttttgaggaacagacaaactgttttccacagcagttgaaccattccacattcccaccagcaatgtatgagaattccaatttctgtccacttcctcaccaacacttattattttccttttcctttttttaaaaaaaataagttatggccatcttagtgggtgtgaagtggtatctcattgtgttttttatttgcatttcctatgtaatgagctagaaactaaagtacaaactagatgggacatccagtccctttgatagataatgctgagtaaaaaatgagatgaaagacatttgtttgtttttagaacatgagtgacagtttgttaaaaagctttagaggaggaatgaaaacaaagtgaagtacacttagaaaagggccaagtggacatcttggatgtcaagtgcctagttcagtatcttttttttttttttttttttttttgagacagtgcctcactctgtcacccaggctggagtgtagtggcatgatctgggctcactgcaacctcctcctcctggattcaagcaattctcttgcttcagcctcccaagtagctgagactacaagcacccaccaccacacccggctaattttgtatttttcagtagagacggggtttcgccacattggccgtgttggtcttgaactcctggcctcaagcaatccgcctacctcagcctcccaaagtgctaggattacaggcataagccactgagcccagccctagttcagtatcttttatgtaaattataaacatctgcaacattatgtatcatatgcagatacttattgcatttcttttattagtggtgaaagtgttctatgcatttattggctcttgaatttcctcatctatgaattgtcattcacacacctacttttctgcttcgtttttacatatgtctttgcctattaaagatattatccctctgttttatattttctctcattcttgtattgccttttaaattttgttatgatgtttcattaataaacagtgttttgttttcctctataatcaaa

SEQ ID NO: 1772 - DNA, 466 bp, Homo sapiens
taaacctcttctctttgtgaattacccagcctcatgtatgtggtttttttttttatagcaacacaaatgaaccaagacacagagggcacaatcatgacagaaattcttgttccgctctctgttttaatttagaggttgataatatccagtattggtgagcatacgagaaaacaggcatccttaccttgtgtgtgggaatgtggattaagggtttttggaaggaagtgggcagccttttcattttaaatggacattctttttgggccagcatctcacttttagatgtctgatctacataagtatttgcatacatgcttagatatgctaaggttttccctgtagtattttcaaaggcatttttgcagggtaatttaaaaaatcgtggtaaagaaaaacaaaatttaccatcttaagcatttctaagtgtacagttagcattgttgaatagcaaaaaaggaaagaaaaa

SEQ ID NO: 1773 - DNA, 466 bp, Homo sapiens; identical to SEQ ID NO: 1772

SEQ ID NO: 1774 - DNA, 1669 bp, Homo sapiens
gcggctccctctctccctctggcccagtcccttccgcttgtgtccgggaagctgtgggcggtgatttaacatgactcacttgggggcataggcgctatgaagttcagtggctgggtgccaggtggcgccaatgacaccctttttctcagagcccgggctgaatggacacctccctcaaagccttccagacccagggttacggccgttcccagagacatgttcccgtgctgctgggcacacctgcagaggggagggaaggtcctgtgtttgctggtgctgctcgtcctctcacttcctaccgagcatcatgttgcaaacaaatgaccttggcaccaccgttttgcaaattgtcctttcttgggctttactttttggtctatgtgagcaaaatgaactgaagtcaaggtacgactcccaataacctgctgtgggatgagagggcttttgtcatttatgcagtctgattagttatccacgcccagagctacactttctcgatgcttctcagctctgactctcacagggccagggagaaatttttgtgccccctaaatcatgtagttggatacaaaacattccctggaggcctaccattctcaaatccccgtgcagggctctgtggggtgcaacatgaaactcgctctaactccctacgtggaggacagacagacccatcctaactccaaagccagacacaagggacaaaggtaccaaaaaggtgcaaggtgcaagaatggacgacgctggtcttccaatttgctggaatatctgtgcggctagaatggtgtcttgttcagcatatatcagcatcttgcccttgctctgtcctgcctggccacaaaggacactcagacaacaccggcctcataaatgctgcctggagaaaagcctagctaggtacggagggtcagggtatttcagaaaagagaaactgcttcagccaatgctcatgagatttaccagggaatagcaaacaagtctagtgcaagccagggttgggggagtgggagggtgattagcagagatcaatctagaaaggaggtcaaggttctgtaggtggggaaagagggtgcttgtgtattaaaacttgttttccagcagtttggagatttctcaaagaactaaaaatagaactaccattcatcccagcaatcccattactaggtatatactcaaaggaaaacaaattgttctatcaaaaagacacctgtactcctatgtttatcgcagcactattcacaatagcaaagacatggagtaaacccaggtgcccatcaacggtgaactggataaagaaaatgtagtacatatgctaccatggaatactacgcagctgtaaagaggaaagaaatcatgacctttgcaacaacatggatacagctggaggccattatgctaagtgaattaatgcagaaacagaaaactaaatatcacatgttcttatttgtaagcagaagctaaatattgggtgcacacaggcacaaagatgggagcaataaacactggggattccacaaagggagcaggcagagggaagggttgaaaaactacctatcaggtcctctgtgcactacttgtgagacagaatcattagaagcccaaacctcagcatcacacaatatacttatataacaaacctgcacattgacccctgaacctaaaattaaaa

SEQ ID NO: 1775 - DNA, 21010 bp, Homo sapiens
cggaagtggaaacggaaacctttttagggagtccaaggtacagtcgccgcgtgcggagcttgttactggttacttggtaagctggtgtgaggggaacctgggagggtcagctccggtcctgggtcgggaggggtgggggccagaggattcagggccggaggttctggtgggggcccagtgggcgggacccgaggacggaggggccgggaggccgagaggggcggggtcgcggcggggcctgagggacggaggccgggatacttgggaaaggatccgccggccttgaactcccgcctccgccgcccctaggcctcatggcggtccgagcttcgttcgagaacaactgtgagatcggctgctttgccaagctcaccaacacctactgtctggtagcgatcggaggctcagagaacttctacaggtgcggcgggagccccggggcttacggtggcggggaggcgtgcgcaggagtcaagagctccggcagtgggagggtgccggcccctctgccccgccaccaccgagtccatgtccctacagtgtgttcgagggcgagctctccgataccatccccgtggtgcacgcgtctatcgccggctgccgcatcatcgggcgcatgtgtgtgggtaaggcaggtggaggacgccgagggagggagtggtctccaagcaccattaattacacccccggagggaacccggagtgacctagggattcccagggtatcatctgttatctctgggcactatagaatctctcaggccaagcgtcaggagatcggggcaaccctctagcaaaggctgctggataatagtaataacaaataatgtaaagtgctttcactcctgttctcattccttcgtcacaaagacactagaaggtaggagttactggcctaacttgactgatgaggaagttgagacttgacctaagtgactcagtaagttccacacctagttcctagtgttggagaaggatttttctcttttttttttttttttgaggccagatttttgctctttcgcccaggctggagtgcagtggcaagatcacagctgtctgcatcctcaacttcttaggctcaagtgatcctcccacctcagcctaccaggtagctagggccacaggcacgtgccaccacacctggctaatttttacatttttggtagagacgcggcctccctgtgttgcccagcctggccttgatctcctgggctcaagtgatcttcttaccttggtctcttaaagtgttgggattataggcgagagccactatacccagccgaggatttgtatctcatctctccctgccactgactgggcaaggtgctttctctttctaagcatccatttctgtctctgtaaagattagctaagatatgcggtcttcctgctcagttacgttggaatcttaaattccctttaccacatctctaccctaccttcctacctgtcagcactgttaattctggtcgttggtcctttcctttttattattattattatttttttttgagatggagttttcgctcttgttgcccaggctggagtgcaatggcacgatcttggctcactgcaacactctcttcaagtgattctcctgcctcagcctcccaagtagctgggattacaggcgcatcccgccacacccggctaatttttttgtatttttagtagagatggagtttcaccatgttggccaggctggtcttgaactcctgacctcaggtgatcctcccacctcggcctcccaaagtgctgggattacaggcgtgagccactgcgcccggccggtcctttcattaagctggatctgtcttccattactgctgcccattgtttcttagttctgctcattgaggtcacttttagaagtctgtttattttatttttttacttttactttaatttttaaaaatcttaagcctgcttgggaggtcgaggcaggtggatcacctgaggtcagcagttcgagactaacctgaccaacatggagaaaccccgtctctactaaaaatacagaaattagccgggtgtggtggcgcatacctataatcccagctacttgggaggctgaggcgggagaattgcttgaaccctggaggtggagctcaccctgcggtgagctgagattgtgccattgcatttcagcctgggcaataagagtgaaactgtgtctcaaaaaaaaacaaaaaacaaaaaacaacaacaacaaaaacttaagcctagtgacctcaaagtattttcctattcagttaaaatactctgatctctaaccatgcccttaggacttgaagcaagttctgacaacaagggagattttagcttagtccttgtgtattttatgatgggagtgacctggaattcagaaattgattggcgtgtatttgtagattgttcattcttgttgctgtatggtgtgttttgtgtaagtatatcacaacgtattcatccattccatcgacagtgcatttgggcagttttcactttggtctgttaggaatagtgctgctggccgggcatggtggctcacgcctgtaatcccagcactctgggaggccgaggcgggcggatcacgaggtcgggagatcgagaccatcctggttaacacggtgaaaccccgtgtctactaaaaatacaaaaaaattagccaggtgtggtggcgggtgcctgtagtcccagctacttgggaggttgaggcaggagaatggtgtgaaccggggaggtagaacttgcagtgagccgagattgtgccactgcactccagcctgggcaacagaacaagactccgtctcaaaaaaaaaaaaaaaagtaatagtgctgctatgtttttttagtgaacacatgtacatatttctactgggtatatgatacctaagagtggcatggcagagtcacaggttatgtgactatttagtagtagttgcagatgatgccagataattatctaaagtgattgaccaacttacactcctgtctcagtatgagagttcagttgctccatatatctttgccaacacttggaattgatgacttgtaaaaattttagtcattctggctgggggcagtggctcacacctgtaatcgtagcactttgggaggtcgaggtgggcggatcacctgaggttaggagttcgagaccagcctggccaacatagtgagaccccatctctacaaaatcacaaaaagttagccaggtgtggtggcacgcacttgtaattccagctactcaggaggccgaagcaggagaatcacctgaacccaggatgcagaagttgcagtgagctgagatcgcaccactgcgctccagcctgggtgacagagtgagactctgccttaaaaaataataatctagccattctgctatgtgtgtagtgttagctcagttttttttgtttttttgttttttttttttggagacggagtttcgctctgtcacccaggttggagtgcagtggcgcgatctcggctcactgcaagctccgcctcccgggttcacgccattctcctgcctcagcctcccgagtagctgggactacaggcgcccgccaccacgcctggctaattttttgtatttttagtagagacggggtttcaccgtgttagccaggatgatctcgatctcgatctcctgaccttgtgatctgcccacctcagcctcccaaagtgctgggattacaggcgtgagccaacacgcccggcagctcagtttttaagtagcaaaatatacagctaatgccaagagctcagcttccctcccagttggtgatggtgaagtaggcaggatttattgggattcctgggtggtctctggcctgccctgggtgttttccagatcagtgggttggagggctgggctctgggcctaaagctttcctgggaaagctgattgggctgggctgagtggtatcctcagcccctagggctcagcaggcatcttgtgtattcaccctctaatttgggtttctccagggaacaggcacggtctcctggtacccaacaataccaccgaccaggagctgcaacacattcgcaacagcctcccagacacagtgcagattaggcgggtggaggagcggctctcagccttgggcaatgtcaccacctgcaatgactacgtggccttggtccacccagacttggacagggtgaggcagcccaacttgacccaagagtcacagggccatcctagtcagtggttagccactgttctttcccaacaggcagcaattaggggtctctcctgtggtttttctatatgggctcttgagtttcaggtactcattggaatagtgataacagaggccttatcaagtgtcagaaagaagctggggagggtatgaatccttcatgattggggagattgaaccatccagtcctgcatcctgggccaggataggtgattgactgttgaacttttgactgtgggtgagaggggaaagaagtgatattgagaccagcctccagctgttcagggcatgcatgaatattaggggcttcacagctgcccttgactctgctctaagctgtacttcctcctttctctgggtgaggctttcatatgaggtacagaggagaaatgaggggctcagggagccaaggcctggatgcttctgggcatggagaaccttggttctggggctgtaagttctgagccctgaacacaatatctttgattgacaggagacagaagaaattctggcagatgtgctcaaggtggaagtcttcagacagacagtggccgaccaggtgctagtaggaagctactgtgtcttcagcaatcagggagggctggtgcatcccaagacttcaattgaagaccaggatgagctgtcctctcttcttcaagtcccccttgtggtaagcattcctgtcctctgaaccccgtctcccgaggcagatccttttgcctagtgtttgggagtctgggtcattacctgccacagtttgggactggggctgcaggtcagggaggagcagggtttggggagagtcttcattgaggagggagagaatttggtgccgtgactcacattgagcccatcccttggcaggcggggactgtgaaccgaggcagtgaggtgattgctgctgggatggtggtgaatgactggtgtgccttctgtggcctggacacaaccagcacagagctgtcagtggtggagagtgtcttcaagctgaatgaagcccagcctagcaccattgccaccagcatgcgggattccctcattgacaggtacctggggcctctcctttcttctgctcagggttgggggttaacttgcattttgagagtatggggaaaagatgtcatctagaatgggagcctaccagtttgttctggtagcttctcgagtgtgagagcatatctgtacactgctgagcagataagagccagcatattcaaaaaatatttcttgagcatctgctaatcctcatctttgtggtttttcagggctaggatactagagcagtagctgcttgagcagcttgtcagagctggtcccgggatgagggctgaggcaggcacctcacttgagagtgaggtgggctctgtgaaacagctactgaccgtgcgctttcctttctcttcagcctcacctgagtcaccttccaagttgttccatgggctcctggctctggactgtggccaaccttctccacattccgcccaatctgtaccggatgctggcagggaggtggcagagagctcactgggactgaggggctgggcacccaacccttttccacctgtgcttatcgcctggatctatcattactgcaaaaacctgctctgttgtgctggctggcaggccctgtggctgctggctgagggttctgctgtcctgtgccaccccattaaagtgcagttccctccgggccattctgaatgtgatgtttggggccctcagcctgtgtacaatccctgcactctccagttgttccagcattctgggaagatagggtgggatgaacacaacacacacccaacccagttcaccacctccacacacgccattcccttctcctctaccatcaggatgtgaggcttcatcctggggcaagaaacactctccactacagttctccttttttcttttttctttttgaggcagtgtctccctctgtcacccaggctggagtgttgtgacgcaaggatggctcactgtagccttgacctgttgggctcaagcgatcctctcgcctcgtttatttttttgtagaaacgaagtcactgtgttgcccaggctggtttatactcctgaactcaagcgacccaccgcctcggcctcccaaagtgttgggattacaggcgtgagccacggcgcccggtctagttctcacagttttcacccgacttctgcgccggtcttctctggccttgaaaggcagagagtccgttccgattttcccctgagctgggcaagtcccctgtgagagctctggggcatctggcttcggggcattctttgactaaggtggatggaggttgcaggtcttttcctgggtgggcgtggggcggggcagcgggttcccagcgtcctcctggcctgggcgtcttggaggctgttgggatgcattccgtccccttgcgcggggcggggccttgaggcgctggggcgggattggcgggggacggtcgcggagccccgccccgaagcacagggtcgagtcccttctttccgctccaacgcacggagggtgaggtcggtacgcggtggtggcgtcacggcgccagctcctcccgacgccgaggtgggttccgggagacccgcgggtctggctgcgagaggtgagggcagagccggggcggggccctagcggggtgtcccggcgacccagaccttaaagggcttctcttcttgcagaccatgggggctcagctaagcggcggccgcggcgccccggagcctgcgcaaacccagccccagccccagccccagcctgcggcgccggagggcccggaacagccccggcatccgccccagccccagccccagccccagccccagccccagcccgagcccagcccgtgggggccgctggacgacgtgcgcttcctcatcgcctgcacttcctggtactgacggcgtcctccgcaggatgtcgcccgtctgtccgccgtcccctgtggttcttgcctgccttgtctcctctccccacgtccctgcgtctcttacaccccctcccacccgaggctccccagagatagcagagaattcgaagaggtcgccggggactggaaagaagtcccggcagggccgccttcgcagtctacaccccagcctgcttcccagcctacacccagacccagctcagaccttcgtgaccaccccatccctttctccggctggctgggtcgggggcatccctctctgtcgctggcttccagaggcaggacaggcctcctggtaagcccgcaaagttgctgacctcctgacttcgtctgccttttattaatatctgtattgctgataaccgtgctcttgactatgtgtcccaggtcatgtcccaggtcatggagaagcccgtgccacagtgaccctccccatactcctgggggggctgctctccatcctggatcgtaaggaggcatcatcaggctgtgttcctggaaccccaataaccctgggcccccagggccagcctgttgtagagggaggctatctgaccgccggtctggcagaggagatgggtgggcagctcccagacaccccaaaggacccggttctcttcccagagcgtcctaaggttactcttggaacctgatctttgttccctcatcccagggaaatgacacactctgtatttctgttttatttagaaatgatttaaaaaacattatacaaaggctgatcagtttaaaatgtgactgacactgaaatgctgtgatgtcccccaggctgaggggaagctaggctctggggcccccagtgctttgcccctctgtctgccctgtcctggggtgatggacaaacagatgaccacaggcaggagaatctgagattggaagcctctaggctgagccctctgggcctggccccacatccctcacctctgcagcctgggctgcctgcctccatctcctgttcattctcagctggcctgccaggagccaatggggagcctggcgggaggcgggggtgcctagagctttcaagaagtgagagcaccaacctgaggagtggacagggaccaggaagtgggggaagggaggccaggaagaggtggatacaggagacacttctcatctcatctcagaccctagaggggtccacagatggggacacaagacccagccagcccactggatggcccgggcaagtaacaacctctctgtgcttcatctgagggcacggtgagagttaccgtcggcctcccagggcctaacacgagtttcatgtgagtggacaggtgtgagctaataaagtgctttgcaaagtataaaacactgtacaaacctatgaatcactaatatctccgcagttgttccctgcctgtcccagggagcctgcccttggccaaaatgagaaaaaacaaggatgatgacaggggacacagcggacccacatgggcacctctgggacaagagattttgcttgagacagctcccagggcagcaggagtccctgtctgtgctacagggtaagccgaccccaatcccagagaccacagggtcgggggcaaggcccatgcaggctcagtgagcaggggtggcatccgagacccggccagcacgctggagactgcctgacacctttttggctttggcagagagccagtgggcattgatgaacccattggccttgtctagggctcctcagtgacaagcagggctgcctccgccgtactgtggagcaaggcaggccaagccctaggaactcctgctggagacagtgaagggcgggccagtgaaggtcaaaaagggagccccctcagcttggggctgctaccggtaggggtgtccttctaagagcagtgtgggaagatgggcccagtgagcgaggtcagcaagggccaagctctgggaaaacactgcttccagccgagagattgagtcggcctcagagtagctggagtcggcctcagagtagtgggggcactgagcacttcagacgccctggtccccttccgaaggactcccaggctctgccagtgttggccctgcagccatctctgcctcacctaactggtgaggctgagctccaggctgcaagtgacagactggagcaaagctggggacagtgacaatagaggggagtggaggacggtcacaaactcggatcttcctccagaaatggggtcagcttctgccccagctctgtagccataggagcagagctcagctactggggtgtctgggcgctagagtggccttagcagcaccttggtccttgtcgcctgggggagggccgctatgctggcctcatcaccaagacagtcacctctagttcacctaaagcctcaagcagcctttgcaaaatgggacagtagtgacaggacatttaaatattcacgatgtgacagctgggtccttgtcagacccagctgggccacagccctgcctgcagcatgtgaccctaaatcctgggtctccgaagagaccctgacaagtggagcaggtttcctgagggatctgccgtctgccagcagggaaacccaggcttgttgctcactgtgtcagaagcaggggtcctgtagccttggaggacagtggggtgggggtagggggacatctgaccagcaggtgttggcaaaaggggaccaggactggtggtatctcccggatgggggatgagagctagtgctggcttcccacagagggtgctgggttccagccaggagtggagctgtggtacctcatggacaccacaggatgccgtgaccacaggggctcctcctggcatggtccctgcctccggatggagcctggcctattcccttaagtagggagtagtttgcccaggacagaaggctggcagctgggtgccagacacccaccctggggcacagcccccataattccctgccccacgctcagcctaggccaatgcacccaccacttcagctgtacgaccccagcctagggccctgctggccctggtgagcactggccagagctgcccctcagaccctggtgaggaagggcctggctggccagaccaagtggatagagagggctctgggctgctcacacccattcctggactggccgcttatagtaggtgacaggctgagggcctgtcttgttcttgaactggaagatggtgtagaccagcaccaggatgcagagggacaggatgcaggggatgaccacggccacggcgttcacggagcccggcacatcgttgatggtcaccatgatgtccacgtcgtcctggggcagccgccgctccttccgccgctccacctccttctggttgcagcccatccagtcacgcaggatgttgcgcgggtagcctggctccacgctcagtttctggttgtcaaacttccagtagtcccggcccttgtagaaataggtgtaatctgcagaaatacagcccagcatcaccactcccagacacttccggcacctgctctggggcagtgtgaaaaggagggcacaggcactgtggcaagggaggcaaggtgggcacacctggaggtttggggtgcagtgcttggctgagtcatggagtaagaagctgcagagggggacacccgggacctggagtggtccgcctgtcatctacgggtgctaggaaaccagaggggcttcagggagaactgggacatggttcactttgtgctgcccagacaggaccccttgcacgcaagcctgggtcacagctctgtcacactgtgcgcacaggtcccccttgccccgctcatgtgggctccattaagcctcagcctggctcctgcttgagccaagggaggcagggagcaagatttcaccttgtgttgacagcaagacctctctgcaattatggatttttttggcttggcacacatcacttcacaacacagatgcaggacctttgggagccttctgggagagaggctgggcagccctgccaatcactccctgggcaaccaccccagggctcgagcaacagcctgagcggcccagccagtgggcaaagcagcttgcttaggccgtcctcattggctggcttcccaccgtggctagggctttcattggtctcggtccttgatgtcacctgtctctgaggctccccaaaaagggagatcttgtgcgtaaagcatcaggtatacaagacagccaacaaatagcagctgtggccattggctttctcagcagtgaagcctcctcagagactccttcccagccatctctaacacggccccctctagctcgttgctctctcccagcatttatttcctttttttttttttttaagacaaggtctcactccattgcctaggctggagtacagtggtgcagttgtaactcactgcagcctcaaactcctggtcttaagcaatcctctggcctcagcctcccaagtagctgggactacaggcacatgtcaccacgcccagctaatttttgtattttttttttgtagagatgaatctcactatgttactcaggctggtctcgaactcctggcctcaagtgatcctcccacctcagcctcccaaagtgctgggagtctttcccttatagcgtctgttgccatcttgctttatgcccctagacttggacgtctgcaagtcctgttgactgctacgtccccagctcccaccacacaagctgtctattattatggagtgagtgaatgaatcctgtcaatccacataaactgaaacccatgatgatgacaatgatgatgacgatagcagctaaaatatacagcatggatggtgtgctaggcattatttctaagtatgctacataatttgtcttctttaatcctcacaaaaccattatataaaggtaggtactgttattatcattttataaatgagaaaacagaaaacttattaaagatttgctcagattcatagtgagtggtactatggtggttacgaacccagccagtccagctctagagtctgtgtttttgaccatatcaatggagatctatttaacaaacactcctggaggcccactctgcatctggccaggctagcagctcctcctgagaagctcctaggctggtggggagacaggctgagtgtctgatggcagtcgtgggggctggtggccagcatggcttctaggaggagttcaggaaacataaaaagtttctctcttgatgcagtggctcacacttgtaatcccagggctttgggaggctgaggtgggaggattgcttgaggccaggagtttgagaccagcctggccaacatagtgaaaccctgttgctacaaaaaaatgtaaattagccaggcacagtggcatgtgcctataatcccaactactcgggaggctgatgaggcaggaggatcatttgagactaggaggttgaggctgcagtgagctatgatcatgccacagcattccagcctaggcgacagagtgagaccttatctcttagaatttaaaaaaaaattttttttgaaggttttctttccatcttcttgccctcgagccctgtgaaaaagtggctttgaaacatgcatgcccatcattgcttttcagattgggtaactcaaggcgtccctggagtacactgaggataagtgtttgagaaatgctgtctgaaggaatgaagtcagtctatgacaacgtctctctgccgtgaatcattcctgcagatgaaaaagtgtgacttggcagctggtaagtgaattaatggaccacgtgaacatgggtagatatgaggcagttgtctgccaccaggtgttttttcaaacctggacgcccatgggcactgagtatgcccgtgggcactggtgaggaccacataaaaccggctccccatgcccaccctggcccggcccttacgtacatccttccttgctgatgaaggctccttggggagcctgtgggatgcccttccacacggtgatgggcttagggtagccagggtccgtggcccgccgctcctcgctgtagcgccagtaccgctcgcctttgaaaaagtaggtcttgcccacaggttcccagcgcagagctgtgtcaatgccttcacggggcaaacagctgcccagctcccccaggctgtgggggtacccaggctccaccgtcacctccttaaacacccaatacttgtcacctgtggccaagaggagcccaggatcagcttccccagtcactcagtgccgtttgcccatcttcagggtgtcaggtgaaaacagtctgatgccctcagccccttggcccagttagagttgggaagggcacgaagcctgaggccagtcacagatcctggacaacttgcctctgctgcctgggctccgagtcccaccctcttttgttcatgtgacttgctcctctctcctctctggtgatctcagccacttacatgactttgcatatgcactaccactccccaaacctgctaccagtgacacccgactctgaggctctcccactggacctgagcagcagagccagaaaccctgacctccctcggcctaccggcagctctgcattggctggctccccagagctcctcatctgcaccacagaggggctccctcctcatcaccttctgcctcccaggtccccaacagggagtcctagcctcactgttgaccctctctttccttctcctctcagtattcagccacttcttttttttaagatggagtttggctcttgttgcccaggctggagtgcaatggtgtgatctcagctcaccacaacctccacttcctgggttcaagcgattctcctgcctcagcctcctgagtagctaggattacaggcacgtgccaccatgcttggctagtttttgtaattttagtagagacgtggtttcaccatgttggtcaggctggtctcaaactcctgacctcaggtgatctgccagccttggcctcccaaagtgctgggatttcgggcgtgagccactgcgcctggccgagtattcagccacttctgaggccctctgactctcctggcagctgtcccctgcccttcagctgcacggctcctccctcatttgggcctcatgagtggcgcgctccagaaccacctcagaaatggctgccctgcccctgccatgtctgtcacctcctgccctctggctctctgctgctcggaaacattccatgaatttccagccttggcctaatggatcaagaccacattctggcctggcagccagggctcttcaggatttgcctccaaatgacctttctgggccatttctcacagctttccaaggcggggcctccgtggccatcaggtgggccttctaagccctgtggccgtccgtacacatcccagccctgctcctttattcagccgttgtccctctggaatgccttccttgcttctcactatctgtatctcacccatctgaggtctggcccgagtcaagataactgtcatgaaacaacctagcacagtgctgggtacagggtgggcaccttagctccctcccacaccctcccccgacctccccagcttgagtgacctcttccctctgggttcttacagaactgacccgatggcctcccatgaggtactgggtggtcttcaattgcttgtcccacactctacttcatgtggacgaagctggtcaccccaccaatctcggcacatacagattctcagtctcactttctgacttgatttgtcagaggtcagtgtctccgttagactagaggggccctctgaggacatctgcctcccaccccgcctcttccagtttagatgggaaaaaggaggtcccaagaccttgggcagggaactgtcccacagcacagtctacattacctttgaagaagacaaatctcccatcggccctttcataggctgcgtcgatgcgggcaggcaggcccttccagaactgctcgatctgcatggggtagccctcctgcactcggttattgcgcagacgccagaaccagcgatcctgggaggaagcgggagagggggagagaggtgtgtcaggccctgcctccgaacccagtgattgcagctgtggggcttaggtcccaacagcccagccctccaccgagactgtccattagctgcttctgacttttaaagccctgggaggaagacaggatgctcctgtaactgtcttcaattcagcctcctgctgactcttgctgctgggtggacaatgagacaaacagcagacaggcctggtgtggaaaaggaggtgtgagggagccggaaaggatgatgttggggcctggagtggccacatgggggcagtggagcgtcactgacatcagccagactggtcctcgggacagtgggaggctggggtggtcactgagcctgggccgagcgccctccatgaggctggctccatccagcagggccaggatcatggaagccaagtcatgggaattccctcgagacctgggcatgaattcacattcctccatttatagctgcatgacctaggcctcacctgcaagtgcaggtaataatggagaatcagatgagagattctaggcaaaatgcccagaccagtacggggcacacagtccatgttgagtaaatggcagctaaatagtccgagtccagtaaaaacgcctcttgtaactggtgcctcagtcttgggctggtacacaagcagtctaggcaaggcctgtagcctccaggcctcagttttctttctttttttttttttttagatggagtctcgctctgtcacccaggctggagtgcagtggcgcaatctcggctcactgcaagctccgcctcccaggttcatgctattctcctgcctcagcctcctgagtagctgggactacaggcgcccgccaccacacccggctaattttttatatttttagtagagatggggtttcaccatgttagccaggatggtcttgatctcctgaccttatgatccgccctccttggcctcccaaagtgttgggattgcaaggcgtgagccactgcgcccagcctccaggcctcagttttcttatgtgtaaatggggatgataaaacccggacctgcctatgaacggttcagttggatcaaagtagaatgagtgcagaagaagaagcatgatttgtaaaagatggtacaaaagctagtattttaaaaggtgttttacaaagcactttcacatccaggtttttgaccttattttgactttcatgtctctgttaagttgatctgagatatacggagtcttaagaaaggccaggtgacttgcctagagccactcagtgagaagccagactggggctgactcacgctgcccgattcctgcgcagtgctcagtgcgtgctgggagaactccacaaggggagcgaggcagcctctttcaccatcctgtgtgatggagccaccctgcccagatccccttcagagaagggcttgttgccccagtggccagcagtgtggccagcaggcagttttcaactgtcagcccctttggggatgttccctgcttcagagagctctcctcagtcactggatgcccttcctcatccagtgattgaatgaggtaggggttataatgttccagatattttggacccaacgtaggctgagtgacaggccaccgtagccccagagctccctgcgggggtggctgaggctgccatgggcctctgttgccacttaacctctccctcttccctgtcctgcttccttctccccctcacaaatgttgattctgaaagtactctctaatcgaaatcctgcattccagaccccacctcagagttcactccccgagagcccaacctgcaacacgtcaagcagactgccaccctgtcagtccatggctgatggaggacagatgacaagatataccctgggctgctgccagtagcagcccctcaagccttggtagggtctggagtcagactcagccaccactgacctagcccctactccaagttgaccatcttcagagccgggtactcactggatcttcacacactctttgttagaggaatgactcccccaggtttcggatggagaaactgaggtcccaagaagggtggtcacagaccagaagccagcttccagcactttctcccagcattaaccccaggggaggtgagggatcacccatctttccccctccctcttgggaacagttgattcacccagcagcactaggaagagaccccatgccctggccactgggctagctcctgtccaggccccattgtaatcgaatcccaaatcaggagccttccccagctccatgatgtcggggaggaggaggaaaggtcaggggccagctgggtggtgccaatccattggccctaccttaaagacaaacatctcgccccggaagagggccactgtgttgaagttgccgtcacagatgttgggtttggtgcctggtgtggatggccggtccccgaggggcggccgagggggcctgggctggcgctcgtgtttcctctccgatggtgagtggatcctgcggacggggagtgtagggagtggccttgtgggctccagaggctcggctgggggtcctggagagaggagctgcatcttagagagggggcagccgtttcccgcctcccattgccagtctcagcatcacccaggcagctctgagacaagtctgtcccagttcagcctcctgttccctctccccagtttaactcccccagtctttgagaaaatggatgaaaatagccattagaatgggactctcatctttccatccccgaatctggtatcttctcttttctctctcctgttacagagcaatcatgtccttccttagggtcagcgctcttccttaggccataccctctttgcccccttcacacgcactggccccacttcctcacccccttcatttattctctttcccaccccagtgcagcttctacccgtcacccactccaactgctctgccaagatcatccaatggttacttgactcagactttaataagcacatgcatcatctggggatgttgctaaaatgcagatgagggctcagagggcctggggtggggcctgagagtttgcattccttcacactctcaggtgatgctgatgctgctggtctgaagactacattttgagcagcaagattcatagaaacactttcctggaaacactctcttggttgtcctcctgcctcatgggctgttctttctcagtctcctttgctggctgcgtgtcctcatctgccctactctagaggctggcgtgcccttgggtcctcttctcttccgtctctacattttcatccttaggtcagtgcttcttcacttgggctgcatattaggatcacctttgggagcttttcaaactggatgttcaggaagcaccaggccagctctccaacttttttttttttttttttttttttgagaaggagtctcgctccgtcccccatgctggagtgcagtggcgtgatctaagctcactgcaacctctgcctcccaggttcaagtgattctcctgcctcatcctcccaagtagctgggactacaggcacgtaccaccacacccaggtgattttttttttttttttttttttttttagcagagatggggtttcaccatgttgaccaggctggtcttgaactcctgacctcaagtgatccacccaccttggcctcccaaagtgctgggattacaggcgtgagccaccacgcccaatacccaactattaataaaaccaaatctctagagctgagggctgggtgtctgtgtttttttattagaatcccaaggtaattccaaagggcagccaagttgagaatcactgctctaggtggtctcatccaggctcatggctttacagacctgcatcagagctgtccagtagagtgttctgtgatgatggaaatggtccatatctgcatcgttcactacagtagcccctagccacagccacatatggctactgaggtcttaagatgaatgactagttcttagtgtgactgagacccactaaagaactataactgaaatgataattttaatatatttttgggggggtagagacaggggtctcactttgttgcccaggctggtcttgaactcctggcctcaagcaatcctcccacctcggcctcccaaagcgctaggattacaggtttgagccaccgcgcccggcctaataaatataaatttaaatttcattactatgaaatttaatactagtttatttaatagtagtttatttaatacatactagtgtatgactagtggttactgtattgaacaacaaagatcccaaataagtattccagcctagattttttttttttttgagacggagtctcactctgtcgcctaggctggagtgcagtggtgtgatctcagctcactgcaacctccgcctcccgggttcaagtgattctcctgcctcagcctcccaagtagctgggattataggcgtgcaccaccatgccaggctaattttttgtatttttagtagagacagggttttgccatgttggccaggctagacttgaactcctgacctcaggtaatcgcccgcctcggcctccagcctagaattttgagctgcagactggtggaccctattgcttcacaattacaaaagctggaaaccctgggggcatccttgaccctccctccttcctctcaccccatgtctgatctgtcagcagatcctgttgttctacctttggaatagcttctgggacccacagcccccacctggtctctgctgctttacttgtggaggtcctgcctgtcctccagggctctggctgggtcatctcctccagagggagccctccttctgtgctccgtagcctgtgggctgtgggtgcctgtgctgtcttgacaagcatttgctcaagtaaactggtctccctagctcacctgacttgaccagaacaagaacctcacataccagtgtgaacagaactgggagagaggtgtgtaggaggcctttcatatcttacctagatagcagtagcttctcatctttcaccttttctttctttttttttttttttttttttttttttttttgagacggagtctcgccctgttgcccaggctggagtgcagtggtgcgatctcagctcactgcaacctctgcctcctgggttcaagtgattctcctgcctcagcctcccaagtagctgagatttcacttgcccaccaccacacctggctaatttttttgtttgtttgttttaatatttttggtagagatggggtttcaccatgttggccagactggtctcaaactcctgacctcaagtgacctgcctgcctcagcctcccaaagtgctgggatttcaggcaagagccaccacgcctggccctcgttttttctttttaaagaacaaagctctggttatagtccccatcacgctgtatcaccgttactcctgcagatgtgtgaacctgcctggctagaggtggaatctatgggagcactcagtcaccatctggtgtgggagggagggagagaagcatgaagggacggggaagagtgtggaaggggaggggtaaaggagagggaatgggtggccctcacctcacttttgtccctctcagttacagctcagaccctcccctaggtttcccaggtgtgccaggggaagccttgccctctggccaggcaaagccattggaagtctgtaaaggtcacacacagagaaacagcagcagtgctgatgatagcaacgtccccctccctcgtcccctgccccatgacaggtaggcagtcacagcccagccccgaggaaggagcagtcccccctctccctgccacacaccatagatcttctggatgccctggagatcgtcctggggcagcttgaagttgtgcgtctccatgtactggtagaagggcgccatgatggcgctggggtcgctggagtgctccagtcccagcgcgtggcccagctcatgcacagccaccaggaagaggtcgttccc

SEQ ID NO: 1776 - DNA, 21024 bp, Homo sapiens
cggaagtggaaacggaaacctttttagggagtccaaggtacagtcgccgcgtgcggagcttgttactggttacttggtaagctggtgtgaggggaacctgggagggtcagctccggtcctgggtcgggaggggtgggggccagaggattcagggccggaggttctggtgggggcccagtgggcgggacccgaggacggaggggccgggaggccgagaggggcggggtcgcggcggggcctgagggacggaggccgggatacttgggaaaggatccgccggccttgaactcccgcctccgccgcccctaggcctcatggcggtccgagcttcgttcgagaacaactgtgagatcggctgctttgccaagctcaccaacacctactgtctggtagcgatcggaggctcagagaacttctacaggtgcggcgggagccccggggcttacggtggcggggaggcgtgcgcaggagtcaagagctccggcagtgggagggtgccggcccctctgccccgccaccaccgagtccatgtccctacagtgtgttcgagggcgagctctccgataccatccccgtggtgcacgcgtctatcgccggctgccgcatcatcgggcgcatgtgtgtgggtaaggcaggtggaggacgccgagggagggagtggtctccaagcaccattaattacacccccggagggaacccggagtgacctagggattcccagggtatcatctgttatctctgggcactatagaatctctcaggccaagcgtcaggagatcggggcaaccctctagcaaaggctgctggataatagtaataacaaataatgtaaagtgctttcactcctgttctcattccttcgtcacaaagacactagaaggtaggagttactggcctaacttgactgatgaggaagttgagacttgacctaagtgactcagtaagttccacacctagttcctagtgttggagaaggatttttctcttttttttttttttttgaggccagatttttgctctttcgcccaggctggagtgcagtggcaagatcacagctgtctgcatcctcaacttcttaggctcaagtgatcctcccacctcagcctaccaggtagctagggccacaggcacgtgccaccacacctggctaatttttacatttttggtagagacgcggcctccctgtgttgcccagcctggccttgatctcctgggctcaagtgatcttcttaccttggtctcttaaagtgttgggattataggcgagagccactatacccagccgaggatttgtatctcatctctccctgccactgactgggcaaggtgctttctctttctaagcatccatttctgtctctgtaaagattagctaagatatgcggtcttcctgctcagttacgttggaatcttaaattccctttaccacatctctaccctaccttcctacctgtcagcactgttaattctggtcgttggtcctttcctttttattattattattatttttttttgagatggagttttcgctcttgttgcccaggctggagtgcaatggcacgatcttggctcactgcaacactctcttcaagtgattctcctgcctcagcctcccaagtagctgggattacaggcgcatcccgccacacccggctaatttttttgtatttttagtagagatggagtttcaccatgttggccaggctggtcttgaactcctgacctcaggtgatcctcccacctcggcctcccaaagtgctgggattacaggcgtgagccactgcgcccggccggtcctttcattaagctggatctgtcttccattactgctgcccattgtttcttagttctgctcattgaggtcacttttagaagtctgtttattttatttttttacttttactttaatttttaaaaatcttaagcctgcttgggaggtcgaggcaggtggatcacctgaggtcagcagttcgagactaacctgaccaacatggagaaaccccgtctctactaaaaatacagaaattagccgggtgtggtggcgcatacctataatcccagctacttgggaggctgaggcgggagaattgcttgaaccctggaggtggagctcaccctgcggtgagctgagattgtgccattgcatttcagcctgggcaataagagtgaaactgtgtctcaaaaaaaaacaaaaaacaaaaaacaacaacaacaaaaacttaagcctagtgacctcaaagtattttcctattcagttaaaatactctgatctctaaccatgcccttaggacttgaagcaagttctgacaacaagggagattttagcttagtccttgtgtattttatgatgggagtgacctggaattcagaaattgattggcgtgtatttgtagattgttcattcttgttgctgtatggtgtgttttgtgtaagtatatcacaacgtattcatccattccatcgacagtgcatttgggcagttttcactttggtctgttaggaatagtgctgctggccgggcatggtggctcacgcctgtaatcccagcactctgggaggccgaggcgggcggatcacgaggtcgggagatcgagaccatcctggttaacacggtgaaaccccgtgtctactaaaaatacaaaaaaattagccaggtgtggtggcgggtgcctgtagtcccagctacttgggaggttgaggcaggagaatggtgtgaaccggggaggtagaacttgcagtgagccgagattgtgccactgcactccagcctgggcaacagaacaagactccgtctcaaaaaaaaaaaaaaaagtaatagtgctgctatgtttttttagtgaacacatgtacatatttctactgggtatatgatacctaagagtggcatggcagagtcacaggttatgtgactatttagtagtagttgcagatgatgccagataattatctaaagtgattgaccaacttacactcctgtctcagtatgagagttcagttgctccatatatctttgccaacacttggaattgatgacttgtaaaaattttagtcattctggctgggggcagtggctcacacctgtaatcgtagcactttgggaggtcgaggtgggcggatcacctgaggttaggagttcgagaccagcctggccaacatagtgagaccccatctctacaaaatcacaaaaagttagccaggtgtggtggcacgcacttgtaattccagctactcaggaggccgaagcaggagaatcacctgaacccaggatgcagaagttgcagtgagctgagatcgcaccactgcgctccagcctgggtgacagagtgagactctgccttaaaaaataataatctagccattctgctatgtgtgtagtgttagctcagttttttttgtttttttgttttttttttttggagacggagtttcgctctgtcacccaggttggagtgcagtggcgcgatctcggctcactgcaagctccgcctcccgggttcacgccattctcctgcctcagcctcccgagtagctgggactacaggcgcccgccaccacgcctggctaattttttgtatttttagtagagacggggtttcaccgtgttagccaggatgatctcgatctcgatctcctgaccttgtgatctgcccacctcagcctcccaaagtgctgggattacaggcgtgagccaacacgcccggcagctcagtttttaagtagcaaaatatacagctaatgccaagagctcagcttccctcccagttggtgatggtgaagtaggcaggatttattgggattcctgggtggtctctggcctgccctgggtgttttccagatcagtgggttggagggctgggctctgggcctaaagctttcctgggaaagctgattgggctgggctgagtggtatcctcagcccctagggctcagcaggcatcttgtgtattcaccctctaatttgggtttctccagggaacaggcacggtctcctggtacccaacaataccaccgaccaggagctgcaacacattcgcaacagcctcccagacacagtgcagattaggcgggtggaggagcggctctcagccttgggcaatgtcaccacctgcaatgactacgtggccttggtccacccagacttggacagggtgaggcagcccaacttgacccaagagtcacagggccatcctagtcagtggttagccactgttctttcccaacaggcagcaattaggggtctctcctgtggtttttctatatgggctcttgagtttcaggtactcattggaatagtgataacagaggccttatcaagtgtcagaaagaagctggggagggtatgaatccttcatgattggggagattgaaccatccagtcctgcatcctgggccaggataggtgattgactgttgaacttttgactgtgggtgagaggggaaagaagtgatattgagaccagcctccagctgttcagggcatgcatgaatattaggggcttcacagctgcccttgactctgctctaagctgtacttcctcctttctctgggtgaggctttcatatgaggtacagaggagaaatgaggggctcagggagccaaggcctggatgcttctgggcatggagaaccttggttctggggctgtaagttctgagccctgaacacaatatctttgattgacaggagacagaagaaattctggcagatgtgctcaaggtggaagtcttcagacagacagtggccgaccaggtgctagtaggaagctactgtgtcttcagcaatcagggagggctggtgcatcccaagacttcaattgaagaccaggatgagctgtcctctcttcttcaagtcccccttgtggtaagcattcctgtcctctgaaccccgtctcccgaggcagatcctttcgcctagtgtttgggagtctgggtcattacctgccacagtttgggactggggctgcaggtcagggaggagcagggtttggggagagtcttcattgaggagggagagaatttggtgccgtgactcacattgagcccatcccttggcaggcggggactgtgaaccgaggcagtgaggtgattgctgctgggatggtggtgaatgactggtgtgccttctgtggcctggacacaaccagcacagagctgtcagtggtggagagtgtcttcaagctgaatgaagcccagcctagcaccattgccaccagcatgcgggattccctcattgacaggtacctggggcctctcctttcttctgctcagggttgggggttaacttgcattttgagagtatggggaaaagatgtcatctagaatgggagcctaccagtttgttctggtagcttctcgagtgtgagagcatatctgtacactgctgagcagataagagccagcatattcaaaaaatatttcttgagcatctgctaatcctcatctttgtggtttttcagggctaggatactagagcagtagctgcttgagcagcttgtcagagctggtcccgggatgagggctgaggcaggcacctcacttgagagtgaggtgggctctgtgaaacagctactgaccgtgcgctttcctttctcttcagcctcacctgagtcaccttccaagttgttccatgggctcctggctctggactgtggccaaccttctccacattccgcccaatctgtaccggatgctggcagggaggtggcagagagctcactgggactgaggggctgggcacccaacccttttccacctgtgcttatcgcctggatctatcattactgcaaaaacctgctctgttgtgctggctggcaggccctgtggctgctggctgagggttctgctgtcctgtgccaccccattaaagtgcagttccctccgggccattctgaatgtgatgtttggggccctcagcctgtgtacaatccctgcactctccagttgttccagcattctgggaagatagggtgggatgaacacaacacacacccaacccagttcaccacctccacacacgccattcccttctcctctaccatcaggatgtgaggcttcatcctggggcaagaaacactctccactacagttctccttttttcttttttctttttgaggcagtgtctccctctgtcacccaggctggagtgttgtgacgcaaggatggctcactgtagccttgacctgttgggctcaagcgatcctctcgcctcgtttatttttttgtagaaacgaagtcactgtgttgcccaggctggtttatactcctgaactcaagcgacccaccgcctcggcctcccaaagtgttgggattacaggcgtgagccacggcgcccggtctagttctcacagttttcacccgacttctgcgccggtcttctctggccttgaaaggcagagagtccgttccgattttcccctgagctgggcaagtcccctgtgagagctctggggcatctggcttcggggcattctttgactaaggtggatggaggttgcaggtcttttcctgggtgggcgtggggcggggcagcgggttcccagcgtcctcctggcctgggcgtcttggaggctgttggggtgcattccgtccccttgcgcggggcggggccttgaggcgctggggcgggattggcgggggacggtcgcggagccccgccccgaagcacagggtcgagtcccttctttccgctccaacgcacggagggtgaggttggtacgcggtggtggcgtcacggcgccagctcctcccgacgccgaggtgggttccgggagacccgcgggtctggctgcgagaggtgagggcagagccggggcggggccctagcggggtgtcccggcgacccagaccttaaagggcttctcttcttgcagaccatgggggctcagctaagcggcggccgcggcgccccggagcctgcgcaaacccagccccagccccagccccagcctgcggcgccggagggcccggaacagccccggcatccgccccagccccagccccagccccagccccagccccagccccagcccagcccgagcccagcccgtgggggccgctggacgacgtgcgcttcctcatcgcctgcacttcctggtactgacggcgtcctccgcaggatgtcgcccgtctgtccgccgtcccctgtggttcttgcctgccttgtctcctctccccacgtccctgcgtctcttacaccccctcccacccgaggctccccagagatagcagagaattcgaagaggtcgccggggactggaaagaagtcccggcagggccgccttcgcagtctacaccccagcctgcttcccagcctacacccagacccagctcagaccttcgtgaccaccccatccctttctccggctggctgggtcgggggcatccctctctgtcgctggcttccagaggcaggacaggcctcctggtaagcccgcaaagttgctgacctcctgacttcgtctgccttttattaatatctgtattgctgataaccgtgctcttgactatgtgtcccaggtcatgtcccaggtcatggagaagcccgtgccacagtgaccctccccatactcctgggggggctgctctccatcctggatcgtaaggaggcatcatcaggctgtgttcctggaaccccaataaccctgggcccccagggccagcctgttgtagagggaggctatctgaccgccggtctggcagaggagatgggtgggcagctcccagacaccccaaaggacccggttctcttcccagagcgtcctaaggttactcttggaacctgatctttgttccctcatcccagggaaatgacacactctgtatttctgttttatttagaaatgatttaaaaaacattatacaaaggctgatcagtttaaaatgtgactgacactgaaatgctgtgatgtcccccaggctgaggggaagctaggctctggggcccccagtgctttgcccctctgtctgccctgtcctggggtgatggacaaacagatgaccacaggcaggagaatctgagattggaagcctctaggctgagccctctgggcctggccccacatccctcacctctgcagcctgggctgcctgcctccatctcctgttcattctcagctggcctgccaggagccaatggggagcctggcgggaggcgggggtgcctagagctttcaagaagtgagagcaccaacctgaggagtggacagggaccaggaagtgggggaagggaggccaggaagaggtggatacaggagacacttctcatctcatctcagaccctagaggggtccacagatggggacacaagacccagccagcccactggatggcccgggcaagtaacaacctctctgtgcttcatctgagggcacggtgagagttaccgtcggcctcccagggcctaacacgagtttcatgtgagtggacaggtgtgagctaataaagtgctttgcaaagtataaaacactgtacaaacctatgaatcactaatatctccgcagttgttccctgcctgtcccagggagcctgcccttggccaaaatgagaaaaaacaaggatgatgacaggggacacagcggacccacatgggcacctctgggacaagagattttgcttgagacagctcccagggcagcaggagtccctgtctgtgctacagggtaagccgaccccaatcccagagaccacagggtcgggggcaaggcccatgcaggctcagtgagcaggggtggcatccgagacccggccagcacgctggagactgcctgacacctttttggctttggcagagagccagtgggcattgatgaacccattggccttgtctagggctcctcagtgacaagcagggctgcctccgccgtactgtggagcaaggcaggccaagccctaggaactcctgctggagacagtgaagggcgggccagtgaaggtcaaaaagggagccccctcagcttggggctgctaccggtaggggtgtccttctaagagcagtgtgggaagatgggcccagtgagcgaggtcagcaagggccaagctctgggaaaacactgcttccagccgagagattgagtcggcctcagagtagctggagtcggcctcagagtagtgggggcactgagcacttcagacgccctggtccccttccgaaggactcccaggctctgccagtgttggccctgcagccatctctgcctcacctaactggtgaggctgagctccaggctgcaagtgacagactggagcaaagctggggacagtgacaatagaggggagtggaggacggtcacaaactcggatcttcctccagaaatggggtcagcttctgccccagctctgtagccataggagcagagctcagctactggggtgtctgggcgctagagtggccttagcagcaccttggtccttgtcgcctgggggagggccgctatgctggcctcatcaccaagacagtcacctctagttcacctaaagcctcaagcagcctttgcaaaatgggacagtagtgacaggacatttaaatattcacgatgtgacagctgggtccttgtcagacccagctgggccacagccctgcctgcagcatgtgaccctaaatcctgggtctccgaagagaccctgacaagtggagcaggtttcctgagggatctgccgtctgccagcagggaaacccaggcttgttgctcactgtgtcagaagcaggggtcctgtagccttggaggacagtggggtgggggtagggggacatctgaccagcaggtgttggcaaaaggggaccaggactggtggtatctcccggatgggggatgagagctagtgctggcttcccacagagggtgctgggttccagccaggagtggagctgtggtacctcatggacaccacaggatgccgtgaccacaggggctcctcctggcatggtccctgcctccggatggagcctggcctattcccttaagtagggagtagtttgcccaggacagaaggctggcagctgggtgccagacacccaccctggggcacagcccccataattccctgccccacgctcagcctaggccaatgcacccaccacttcagctgtacgaccccagcctagggccctgctggccctggtgagcactggccagagctgcccctcagaccctggtgaggaagggcctggctggccagaccaagtggatagagagggctctgggctgctcacacccattcctggactggccgcttatagtaggtgacaggctgagggcctgtcttgttcttgaactggaagatggtgtagaccagcaccaggatgcagagggacaggatgcaggggatgaccacggccacggcgttcacggagcccggcacatcgttgatggtcaccatgatgtccacgtcgtcctggggcagccgccgctccttccgccgctccacctccttctggttgcagcccatccagtcacgcaggatgttgcgcgggtagcctggctccacgctcagtttctggttgtcaaacttccagtagtcccggcccttgtagaaataggtgtaatctgcagaaatacagcccagcatcaccactcccagacacttccggcacctgctctggggcagtgtgaaaaggagggcacaggcactgtggcaagggaggcaaggtgggcacacctggaggtttggggtgcagtgcttggctgagtcatggagtaagaagctgcagagggggacacccgggacctggagtggtccgcctgtcatcctacgggtgctaggaaaccagaggggcttcagggagaactgggacatggttcactttgtgctgcccagacaggaccccttgcacgcaagcctgggtcacagctctgtcacactgtgcgcacaggtcccccttgccccgctcatgtgggctccattaagcctcagcctggctcctgcttgagccaagggaggcagggagcaagatttcaccttgtgttgacagcaagacctctctgcaattatggatttttttggcttggcacacatcacttcacaacacagatgcaggacctttgggagccttctgggagagaggctgggcagccctgccaatcactccctgggcaaccaccccagggctcgagcaacagcctgagcggcccagccagtgggcaaagcagcttgcttaggccgtcctcattggctggcttcccaccgtggctagggctttcattggtctcggtccttgatgtcacctgtctctgaggctccccaaaaagggagatcttgtgcgtaaagcatcaggtatacaagacagccaacaaatagcagctgtggccattggctttctcagcagtgaagcctcctcagagactccttcccagccatctctaacacggccccctctagctcgttgctctctcccagcatttatttcctttttttttttttttaagacaaggtctcactccattgcctaggctggagtacagtggtgcagttgtaactcactgcagcctcaaactcctggtcttaagcaatcctctggcctcagcctcccaagtagctgggactacaggcacatgtcaccacgcccagctaatttttgtattttttttttgtagagatggaatctcactatgttactcaggctggtctcgaactcctggcctcaagtgatcctcccacctcagcctcccaaagtgctgggagtctttcccttatagcgtctgttgccatcttgctttatgcccctagacttggacgtctgcaagtcctgttgactgctacgtccccagctcccaccacacaagctgtctattattatggagtgagtgaatgaatcctgtcaatccacataaactgaaacccatgatgatgacaatgatgatgacgatagcagctaaaatatacagcatggatggtgtgctaggcattatttctaagtatgctacataatttgtcttctttaatcctcacaaaaccattatataaaggtaggtactgttattatcattttataaatgagaaaacagaaaacttattaaagatttgctcagattcatagtgagtggtactatggtggttacgaacccagccagtccagctctagagtctgtgtttttgaccatatcaatggagatctatttaacaaacactcctggaggcccactctgcatctggccaggctagcagctcctcctgagaagctcctaggctggtggggagacaggctgagtgtctgatggcagtcgtgggggctggtggccagcatggcttctaggaggagttcaggaaacataaaaagtttctctcttgatgcagtggctcacacttgtaatcccagggctttgggaggctgaggtgggaggattgcttgaggccaggagtttgagaccagcctggccaacatagtgaaaccctgttgctacaaaaaaatgtaaattagccaggcacagtggcatgtgcctataatcccaactactcgggaggctgatgaggcaggaggatcatttgagactaggaggttgaggctgcagtgagctatgatcatgccacagcattccagcctaggcgacagagtgagaccttatctcttagaatttaaaaaaaaattttttttgaaggttttctttccatcttcttgccctcgagccctgtgaaaaagtggctttgaaacatgcatgcccatcattgcttttcagattgggtaactcaaggcgtccctggagtacactgaggataagtgtttgagaaatgctgtctgaaggaatgaagtcagtctatgacaacgtctctctgccgtgaatcattcctgcagatgaaaaagtgtgacttggcagctggtaagtgaattaatggaccacgtgaacatgggtagatatgaggcagttgtctgccaccaggtgttttttcaaacctggacgcccatgggcactgagtatgcccgtgggcactggtgaggaccacataaaaccggctccccatgcccaccctggcccggcccttacgtacatccttccttgctgatgaaggctccttggggagcctgtgggatgcccttccacacggtgatgggcttagggtagccagggtccgtggcccgccgctcctcgctgtagcgccagtaccgctcgcctttgaaaaagtaggtcttgcccacaggttcccagcgcagagctgtgtcaatgccttcacggggcaaacagctgcccagctcccccaggctgtgggggtacccaggctccaccgtcacctccttaaacacccaatacttgtcacctgtggccaagaggagcccaggatcagcttccccagtcactcagtgccgtttgcccatcttcagggtgtcaggtgaaaacagtctgatgccctcagccccttggcccagttagagttgggaagggcacgaagcctgaggccagtcacagatcctggacaacttgcctctgctgcctgggctccgagtcccaccctcttttgttcatgtgacttgctcctctctcctctctggtgatctcagccacttacatgactttgcatatgcactaccactccccaaacctgctaccagtgacacccgactctgaggctctcccactggacctgagcagcagagccagaaaccctgacctccctcggcctaccggcagctctgcattggctggctccccagagctcctcatctgcaccacagaggggctccctcctcatcaccttctgcctcccaggtccccaacagggagtcctagcctcactgttgaccctctctttccttctcctctcagtattcagccacttcttttttttaagatggagtttggctcttgttgcccaggctggagtgcaatggtgtgatctcagctcaccacaacctccacttcctgggttcaagcgattctcctgcctcagcctcctgagtagctaggattacaggcacgtgccaccatgcttggctagtttttgtaattttagtagagacgtggtttcaccatgttggtcaggctggtctcaaactcctgacctcaggtgatctgccagccttggcctcccaaagtgctgggatttcgggcgtgagccactgcgcctggccgagtattcagccacttctgaggccctctgactctcctggcagctgtcccctgcccttcagctgcacggctcctccctcatttgggcctcatgagtggcgcgctccagaaccacctcagaaatggctgccctgcccctgccatgtctgtcacctcctgccctctggctctctgctgctcggaaacattccatgaatttccagccttggcctaatggatcaagaccacattctggcctggcagccagggctcttcaggatttgcctccaaatgacctttctgggccatttctcacagctttccaaggcggggcctccgtggccatcaggtgggccttctaagccctgtggccgtccgtacacatcccagccctgctcctttattcagccgttgtccctctggaatgccttccttgcttctcactatctgtatctcacccatctgaggtctggcccgagtcaagataactgtcatgaaacaacctagcacagtgctgggtacagggtgggcaccttagctccctcccacaccctcccccgacctccccagcttgagtgacctcttccctctgggttcttacagaactgacccgatggcctcccatgaggtactgggtggtcttcaattgcttgtcccacactctacttcatgtggacgaagctggtcaccccaccaatctcggcacatacagattctcagtctcactttctgacttgatttgtcagaggtcagtgtctccgttagactagaggggccctctgaggacatctgcctcccaccccgcctcttccagtttagatgggaaaaaggaggtcccaagaccttgggcagggaactgtcccacagcacagtctacattacctttgaagaagacaaatctcccatcggccctttcataggctgcgtcgatgcgggcaggcaggcccttccagaactgctcgatctgcatggggtagccctcctgcactcggttattgcgcagacgccagaaccagcgatcctgggaggaagcgggagagggggagagaggtgtgtcaggccctgcctccgaacccagtgattgcagctgtggggcttaggtcccaacagcccagccctccaccgagactgtccattagctgcttctgacttttaaagccctgggaggaagacaggatgctcctgtaactgtcttcaattcagcctcctgctgactcttgctgctgggtggacaatgagacaaacagcagacaggcctggtgtggaaaaggaggtgtgagggagccggaaaggatgatgttggggcctggagtggccacatgggggcagtggagcgtcactaacatcagccagactggtcctcgggacagtgggaggctggggtggtcactgagcctgggccgagcgccctccatgaggctggctccatccagcagggccaggatcatggaagccaagtcatgggaattccctcgagacctgggcatgaattcacattcctccatttatagctgcatgacctaggcctcacctgcaagtgcaggtaataatggagaatcagatgagagattctaggcaaaatgcccagaccagtacggggcacacagtccatgttgagtaaatggcagctaaatagtccgagtccagtaaaaacgcctcttgtaactggtgcctcagtcttgggctggtacacaagcagtctaggcaaggcctgtagcctccaggcctcagttttctttctttttttttttttttagatggagtctcgctctgtcacccaggctggagtgcagtggcgcaatctcggctcactgcaagctccgcctcccaggttcatgctattctcctgcctcagcctcctgagtagctgggactacaggcgcccgccaccacacccggctaattttttatatttttagtagagatggggtttcaccatgttagccaggatggtcttgatctcctgaccttatgatccgccctccttggcctcccaaagtgttgggattgcaaggcgtgagccactgcgcccagcctccaggcctcagttttcttatgtgtaaatggggatgataaaacccggacctgcctatgaacggttcagttggatcaaagtagaatgagtgcagaagaagaagcatgatttgtaaaagatggtacaaaagctagtattttaaaaggtgttttacaaagcactttcacatccaggtttttgaccttattttgactttcatgtctctgttaagttgatctgagatatacggagtcttaagaaaggccaggtgacttgcctagagccactcagtgagaagccagactggggctgactcacgctgcccgattcctgcgcagtgctcagtgcgtgctgggagaactccacaaggggagcgaggcagcctctttcaccatcctgtgtgatggagccaccctgcccagatccccttcagagaagggcttgttgccccagtggccagcagtgtggccagcaggcagttttcaactgtcagcccctttggggatgttccctgcttcagagagctctcctcagtcactggatgcccttcctcatccagtgattgaatgaggtaggggttataatgttccagatattttggacccaacgtaggctgagtgacaggccaccgtagccccagagctccctgcgggggtggctgaggctgccatgggcctctgttgccacttaacctctccctcttccctgtcctgcttccttctccccctcacaaatgttgattctgaaagtactctctaatcgaaatcctgcattccagaccccacctcagagttcactccccgagagcccaacctgcaacacgtcaagcagactgccaccctgtcagtccatggctgatggaggacagatgacaagatataccctgggctgctgccagtagcagcccctcaagccttggtagggtctggagtcagactcagccgccactgacctagcccctactccaagttgaccatcttcagagccgggtactcactggatcttcacacactctttgttagaggaatgactcccccaggtttcggatggagaaactgaggtcccaagaagggtggtcacagaccagaagccagcttccagcactttctcccagcgttaaccccaggggaggtgagggatcacccatctttccccctccctcttgggaacagttgattcacccagcagcactaggaagagaccccatgccctggccactgggctagctcctgtccaggccccattgtaatcgaatcccaaatcaggagccttccccagctccatgatgtcggggaggaggaggaaaggtcaggggccagctgggtggtgccaatccattggccctaccttaaagacaaacatctcgccccggaagagggccactgtgttgaagttgccgtcacagatgttgggtttggtgcctggtgtggatggccggtccccgaggggcggccgagggggcctgggctggcgctcgtgtttcctctccgatggtgagtggatcctgcggacggggagtgtagggagtggccttgtgggctccagaggctcggctgggggtcctggagagaggagctgcatcttagagagggggcagccgtttcccgcctcccattgccagtctcagcatcacccaggcagctctgagacaagtctgtcccagttcagcctcctgttccctctccccagtttaactcccccagtctttgagaaaatggatgaaaatagccattagaatgggactctcatctttccatccccgaatctggtatcttctcttttctctctcctgttacagagcaatcatgtccttccttagggtcagcgctcttccttaggccataccctctttgcccccttcacacgcactggccccacttcctcacccccttcatttattctctttcccaccccagtgcagcttctacccgtcacccactccaactgctctgccaagatcatccaatggttacttgactcagactttaataagcacatgcatcatctggggatgttgctaaaatgcagatgagggctcagagggcctggggtggggcctgagagtttgcattccttcacactctcaggtgatgctgatgctgctggtctgaagactacattttgagcagcaagattcatagaaacactttcctggaaacactctcttggttgtcctcctgcctcatgggctgttctttctcagtctcctttgctggctgcgtgtcctcatctgccctactctagaggctggcgtgcccttgggtcctcttctcttccgtctctacattttcatccttaggtcagtgcttcttcacttgggctgcatattaggatcacctttgggagcttttcaaactggatgttcaggaagcaccaggccagctctccaacttttttttttttttttttttttttgagaaggagtctcgctccgtcccccatgctggagtgcagtggcgtgatctaagctcactgcaacctctgcctcccaggttcaagtgattctcctgcctcatcctcccaagtagctgggactacaggcacgtaccaccacacccaggtgatttttttttttttttttttttttttttttagcagagatggggtttcaccatgttgaccaggctggtcttgaactcctgacctcaagtgatccacccaccttggcctcccaaagtgctgggattacaggcgtgagccaccacgcccaatacccaactattaataaaaccaaatctctagagctgagggctgggtgtctgtgtttttttattagaatcccaaggtaattccaaagggcagccaagttgagaatcactgctctaggtggtctcatccaggctcatggctttacagacctgcatcagagctgtccagtagagtgttctgtgatgatggaaatggtccatatctgcatcgttcactacagtagcccctagccacagccacatatggctactgaggtcttaagatgaatgactagttcttagtgtgactgagacccactaaagaactataactgaaatgataattttaatatatttttgggggggtagagacaggggtctcactttgttgcccaggctggtcttgaactcctggcctcaagcaatcctcccacctcggcctcccaaagcgctaggattacaggtttgagccaccgcgcccggcctaataaatataaatttaaatttcattactatgaaatttaatactagtttatttaatagtagtttatttaatacatactagtgtatgactagtggttactgtattgaacaacaaagatcccaaataagtattccagcctagattttttttttttttgagacggagtctcactctgtcgcctaggctggagtgcagtggtgtgatctcagctcactgcaacctccgcctcccgggttcaagtgattctcctgcctcagcctcccaagtagctgggattataggcgtgcaccaccatgccaggctaattttttgtatttttagtagagacagggttttgccatgttggccaggctagacttgaactcctgacctcaggtaatcgcccgcctcggcctccagcctagaattttgagctgcagactggtggaccctattgcttcacaattacaaaagctggaaaccctgggggcatccttgaccctccctccttcctctcaccccatgtctgatctgtcagcagatcctgttgttctacctttggaatagcttctgggacccacagcccccacctggtctctgctgctttacttgtggaggtcctgcctgtcctccagggctctggctgggtcatctcctccagagggagccctccttctgtgctccgtagcctgtgggctgtgggtgcctgtgctgtcttgacaagcatttgctcaagtaaactggtctccctagctcacctgacttgaccagaacaagaacctcacataccagtgtgaacagaactgggagagaggtgtgtaggaggcctttcatatcttacctagatagcagtagcttctcatctttcaccttttctttctttttttttttttttttttttttttttttgagacggagtctcgccctgttgcccaggctggagtgcagtggtgcgatctcagctcactgcaacctctgcctcctgggttcaagtgattctcctgcctcagcctcccaagtagctgagatttcacttgcccaccaccacacctggctaatttttttgtttgtttgttttaatatttttggtagagatggggtttcaccatgttggccagactggtctcaaactcctgacctcaagtgacctgcctgcctcagcctcccaaagtgctgggatttcaggcaagagccaccacgcctggccctcgttttttctttttaaagaacaaagctctggttatagtccccatcacgctgtatcaccgttactcctgcagatgtgtgaacctgcctggctagaggtggaatctatgggagcactcagtcaccatctggtgtgggagggagggagagaagcatgaagggacggggaagagtgtggaaggggaggggtaaaggagagggaatgggtggccctcacctcacttttgtccctctcagttacagctcagaccctcccctaggtttcccaggtgtgccaggggaagccttgccctctggccaggcaaagccattggaagtctgtaaaggtcacacacagagaaacagcagcagtgctgatgatagcaacgtccccctccctcgtcccctgccccatgacaggtaggcagtcacagcccagccccgaggaaggagcagtcccccctctccctgccacacaccatagatcttctggatgccctggagatcgtcctggggcagcttgaagttgtgcgtctccatgtactggtagaagggcgccatgatggcgctggggtcgctggagtgctccagtcccagcgcgtggcccagctcatgcacagccaccaggaagaggtcgttccc

SEQ ID NO: 1777 - DNA, 437 bp, Homo sapiens
ggctctgggtgctttaagaatgtctgggagggtcgagcagggattctgaggagagaggggtcatttaaacctggaggaagatgttcagggaaagcttcacaaaggtgaagttgaagctcagtcttgaaggatcagaagttagtcaggagaacggattcagggggcaggagaggaagggtgggggtggcattcctggcggatggaatgcaataaacacagtccagagacaggcagtttcattccacctggctctggaacaaagcaggaggggagggccggagagagatgaggtcagccaggctggaaagcagggcgcttaatgccatacaaaggaatttggatcagcttcttggctagtggggggtttaagtaggagtgggggtggtgatacaattaaatcactctggctgcagttgagggaggattagagggaacaa

SEQ ID NO: 1778 - DNA, 854 bp, Homo sapiens
ccaggccctgaaggatggggaggttttggacagagggaggagagagttagaaaaatttttggtagagagaatcaggtgaaagagatgccctaaagaggactgagtgggtctgaggtgaatgagtgaggaagagcagagtatgtggatacccggaaacacacacacacacacatcatcattatcatcatcatcattgtcgtcgtcatcatcttgctgagtcatcatcatcatcatcatcattgtcgtcgtcatcatcttgctgagtgtctcttgaagtacaggctgtgacaggttgtgggccattttcctgaactcaccacttacccgggatagtaaacatgatacacatcaataaaggcagactttattgtgaatcacagcgcctggtgtatcctgaactttgaggagttatgggagggacacgttgggggaatgggaagggcaccattcaggccaattatggggaaacccctggaggagggtgaatgccgaaggaggaattgggggagtccaggggctccaagttaccactgtgacattttgagagaacccggggcttttgcagattctacaaaatgtgggccaagttcatcctgtccaagtgtgcagcagggcccttggcccccatcactatcctggggacagaagttggctgctgagtgagtgatagaggccgtgcgagaggcacatcgtggaagccaaccagcacccacatccttgcccaccctggacccctttccagccttttcctgagcccctgcttcctcagtcctcccctctctccagcacctgcagcctggctgcctttccgtctctggctgcgctctttctccagcctcggtctggccgcactt

SEQ ID NO: 1779 - DNA, 437 bp, Homo sapiens; identical to SEQ ID NO: 1777

SEQ ID NO: 1780 - DNA, 854 bp, Homo sapiens; identical to SEQ ID NO: 1778

SEQ ID NO: 1781 - DNA, 670 bp, Homo sapiens
tcggcacagtgacagaggcacccagggctcagcaagctcatggcccagcttgttggactcagagggcagaagaatcacattctaaacatgataaggtatagccagcaggaggcagattcccagattgattctccagagccttgtaggtcccaagggtgcctatgacaccaatgggaatctgaaccaacacagacagcacagtcttcttaggagaccctagtgcagcagcgctggcctcctcctgagcgtgcacgcttatatggcttctgagctggccaggctacttcatgcatttggtttaatgggtcctcgtaaggcaggagaatcttcttgaacttggagttgggtctgtggtccattggtcagtactttgttcagaggcactgagggtgggaaggctcatggagctggattctgctgctgggaagctgggtgggccttgtttgtgggcctcaggttcaggactgaatgagagtcctcttgttgcgagttgagggtgtactctgggcatgccatgccctttttttgtactaagagggtagaaaagcaaagaccagactagttggcaaattggaacccaactacccagtttatttatttcttaggcgtagaaggaataatttagggggaactgaagagccaacctaaaggaaaaaaataaaataaaggg

SEQ ID NO: 1782 - DNA, 670 bp, Homo sapiens; identical to SEQ ID NO: 1781

SEQ ID NO: 1783 - DNA, 24413 bp, Homo sapiens
ccggctcgcggcgcgtggaggctgctcccagccgcgcgcgagtcagactcgggtgggggtcccggcggcggtagcggcggcggcggtgcgagcatgtcgtggctcttcggcattaacaagggccccaagggtgaaggcgcggggccgccgccgcctttgccgcccgcgcagcccggggccgagggcggcggggaccgcgggttgggagaccggccggcgcccaaggacaaatggagcaacttcgaccccaccggcctggagcgcgccgccaaggcggcgcgcgagctggagcactcgcgtgagtgcggcggggcggggcggggcgggcgggcgggcgggacgggccggggaagcgggagccctggcccttgccgctcctcgctgctgtcggcagccacttcccgggcgagactgcgcccccggagcacccccggccggagccgtctcgcgtgccgggaggatcggactctttccgtcacccgtttgcacctctgcagctgtcaggagcgggtcaggtgcgaaaagcggtgcggaggtggcgctcataggttacaggggtcagggtctggggctggccgtggtcttcagttaccgccgagcgtgcgggatccttctgcgcttgccgcctccacgtggcacaggccaaggcgtggccagatgggtagatgggtttgttgggtggttgctagcagtttccacgtaacaagggaagcgtatttgagagttacttgattctaacgagactagcagatttgcacttcttgttggaagacgttagcatttgcacggcgaggtctgtgaagccacaggccaggccgtgctgctcagcttgagtaaacccctgacccaaggccctcagggtgtgagcactgactgcaccttccctaagctcgggtctcttcccccagccttcctttcccctgtggctttaacgatttgtagcacgatgcagttcaaatggctaggagtctggaacgtagaaggtgctgaattcattgaaagaatacagtggttctcaactcttgtttaagccggggttctttctatttatttatatattgagacacagtatcgccctgtcgccgaggctggagtgcagtggtgcgatttcggctccctgcaacctccgcctccgattctcctgccgcagcctctcgagtagctgggattacagccgcgcagcaccacgcccggctaattttttttgtatctttagtagagacgggtttcaccatgttggccagggtgctctccaactcctgacctcgtgatccgcccgccttgtcctcctgaagtgttgggattacaggcctgagccacagcgcccagacagaagggattccttttttttttttttttttttttttgagatgagtctcgctctgtcgcccaggctggagtgcagtgacgtgatctccactcactgcaagctccgcctcccgtgttcacaccattctcctgcctcagcctcccgaatagctgggagtacaggcgcccgccaccacgcccggctaattttgtagagatggggtttcaccgtgttagccaggatggtctcgatctcctgacctcgtgattaattttttgtatttttagtagagacggggtttcactgtattagccagggtggtctcgatctcctgacctcgtggtccacccgcctcggcctcccaaagtgctgggattacaggcgtgagccaccgcatgccacctttttttttttaagatgatgtcttgctctttggccaggctggagtgcaatggcgccatcttgtctcactgcaaaccgcaacgccctggttcaaagaattctgctgcctcagcctcccaagtagctgggattacaggcacgcgccaccacgcccagctaatttttgtatttttagtagagacgtggtttcaccaccttggccagggtggtcttgaccacctgaccccgtgatccacccgcctcgacctcccaaagtgatgagattacagtcctgagccaccgcaccctgccagcaggggttcctttttagaaagaagatcatttagggaatccctggtgtgaagcagatataaacagagtttccctgtttaaggagggatggcctggtggtacttgtggttccatcctgtgcccttccccggggtgctggggaacatcctgagctgaggtttctggccccggctgggtctcataaccccagagggacattcaggtttgggcccaggcccaggctaacatggatagtcctagctgggcaccaccgacagtgcgtgttctgttttgaagagatggggtcttgctttgtcgcccagtctggccttgacctcctgggtaaaagccgtccaaccgtctcagcctcctgaggagaggggactgcaggcttgctcggtaatttttcttttttcttttctttttttctttttttttttgacggagtctcgctgtcgcccaggctggagtgcagtggcgtgatcacggctcactgcaagctccgcctcctgggtacacgccattctcctgcctcagcctcccgagtagctgggactacaagtgcccgccgccacgcccggctaattttttgtattttttttagagaccggttttcaccatgttagccagaatggtctcgatctcctgaccccgtgatccacccgcctcggccacccaaagtgctgggattacagacgtgagccaccgcgcccggctttgctccgtaatttttctgtgtgtttttgagactgagtctggctctgccgcccaggctggaatgcagtggcatcatctctgctcactgcaacctttgcctttggggttcaagcgattctcctgcctcagcctcccgagtagctgggatcacaggcgcccgccagcacacctggctaatttttgtgtttttttactagagacggggtttcaccatgttgtttaggctggtcttgaattctggcctcaggtgattcgcccacctcggcctcccaaagcgctgggatgacaggcgtgagccgctgctcatggccttcctcggtaattttaacgatcaggttaggatgggaatcaagggctggacttcagggcacctcggaggacagcggatgttggtgactgactttcttgctgcaggcttatttggagggttcctttgtgtcctagttcctgggggttttcacccgctaacttcacttagagattgaaacttctcccacttccagaagctgaatcgtagtgatcagcctgcggccccctgcagtggtacaggcctggttgagcagcctcaggccgcctccccatagtgcagacctgtgcctctgagttgctccagtcctggcggccccggagctcctgacccgcagtccgctctgccggcgttgccagtgccttggtctgccctctctgtggtggagcggggcccggggcagggtctccaggtgcaccgtggggagccctccatcaggcttttgtttctgtggattgtgttccaggtgtgggctctttcattttgatcccttctctccttcctggcctcactgctggcgggtgagagaggtttctccggagttgactgccccctttccccgggtgccccctgccctgcccctctgcctggtagcccctctgcaagcccggcccctcccgacgctcctggcttcctccgtgcccctttcctggcagcggggtcgccgagattcgcccgttgctttgtccttgctgctctccaggcaaacgggcggctcctcctcaccgactgcctcctctgtcccttgaggctatagccccatgccgcctcgttcccagagtctgccctgacccctcctccggcctgtccttggaagtcacagcagtacattatcccagaactgtctgtgagcaccagcgctcgccctgcactccacagagggggtgcctggaggagagcctcgtgccctgtgggtgtgaattcacgcgctgggacgcacgtccctggcacagggtcacaccaaagtggtgaatgattgttctcattctaataaccgagaggccacacgggcacctgacctgctctttcccctctcctcctccccagagtcactgggggtaggaactgtcaatgagccattttcaggggagggagtggcctcagcttaatccagccaaaggtcccctcgggaggaaacaggcagagctcctcaccgtgacacccacgttcctgtcactgctctgtggcaggaccctgggggactgacacaccctcagtcccctcggggtcagagtgagagtggttgagagcccggggtcgcttcagcccttggcttcccgagtttagcagccaaacccgttgacctggcactgtcttccctgagaggcaggtcccggtctcatctgtgctctgttcactggggcccccgaggttagctaccaaggcgcttcctgaaatgtgacgctgatgcccgtcagcccagttcgtgcctaaccacaggcccaagcagacccaccccaacaccaaagtgtcgctgcctctgtctaaatgcaacgagtgctccccacggcacttccccctgcgtcagtcacctccaaaaattacacctgagctgagaacagacgctgggctctagttagtgacgtgtttgctgcagttgactctgaaggcttaaaaaagtgagacgggctgcgggaggaagagagacgggaacaacgcaccaacccaggagcatcgggggtccctgcctactttacacgtctttctgtgttagaataatttttttttttttgagacggactcttgctgtctcccccgctggagtgcattgcttcgatctctgctcactgcaagctctgcctcccaggttcacgccattctcctgcctcagcctcctgagtagctaggactacaagtgcccgccgccacgcccggctaattttttgtatttttagtagagacggggtttcactgtgttaaccaggatggtcttgatctcctgacctcatgatccacccgcctcagcctcccaaagtgctgggattacaggcgtgagccaccacgccctgctagaataatttttttttagagacggagttgcgctctgttgccccggctggagtgcggtggtgcgatctcggctcgctgcaagctctgcctcccaggttccagcaattctccagccttggcctccccagtagctgagatcacaggcgtgcaccaccacacccagcttttttttgtgtttttagtggagacaggatttcgccatgttggccaggttggagattttatttttcttaagtctcactctgtccagctggagtgcagcagtgtgatctgggtgactgtagcctctgcctccggggttcaagccatcctcccacctgagcctcagagttgctgggattacaggcgtgaaccaccgcttcccactaggtttttgtatttttagtagaggttgggtttcaccatgttggccaggctttggtatccgtgtatcctacacctgctctccgtgccacatgcgcccgcaggttacgccaaggaggccctgaatctggcgcagatgcaggagcagacgctgcagttggagcaacagtccaagctcaaagtgagtggggccggtgtgggcgaggaggccggggcgcacatggggttcaggcgtggagattggtggggctgctactggtgggtagggccaggggcgtgtacatgggcagcagtggggccagggccgagcttgggcgcctcatttcacagagggaaacaaggggaggtgagagacgctgccgcagagccgcccgagagggagggtcagtgttggtgagggcgtctggtcgtcctgagggagggccggtgttggtgagggcatctggtcgtcctgagggagggggtcttcttcacattctcacctcatttcttttcactcagcaggattttttattttattttattttattttattttattttattttatttattttgaaacggagtctcactcttgcctaggctggagtgcaatggcgcaatctcggctcactgcaacctccgcctcccgggttcaagcgattcatctgcctcagcctctggagtagctgggattacaggcacgcgccaccacgcctggctaatgttgtattttagtagagacggggtttctccatgttggtcaggctggtctctaactcccgacctcaggtgatccacccgcctcggcctctcaaactgctgggattacaggcacgcgccaccacgcctggcctattttattttattttgagacagagtgtcactctgtcccccagtctggcgtgcaatggtttgatctcggctcactgcaacctccacctcccgggttcaacctcctgcctcagccttccgagcagctgggactacaggagcctgccaccacatctggcgaatttttgtatttttagtagagaagggggttcagcatgttgtccaggttggtcttgaactcctgacctcaggtgatccagccactttggcctcacaaagtgctgggattataggcaagagcgatggcgcccggcccactcagcaggattcctagaatgggcacgagctctgccctcatcacagtccaaaagtgagcacctgcctggagctgcccagaaacagccttgtggggtggggttggtgtctgacctccctccccgggggccttcgcaggcttctctgctggtgcttctgtgcctgtgggtctggattcctccagggcctgatcctgggtgcagatgcagctggaagccctgaacctgctgcacacactagtctgggcacggagtctctgccgtgccggagctgtgcagacacaggagcggctgtcaggcagtgccagccctgagcaagtgccagctggtgagtgctgtgctctgcaggagtatgaggccgccgtggagcagctcaagagcgagcagatccgggcgcaggctgaggagaggaggaagaccctgagcgaggagacccggcagcaccaggccgtaagagcgcaagaggccgcgagggaggccgcccggctgcggggagcggcctggggcaggactgggagctgggtgtggtcccggggcactctggagtcagccattagagctgccctcggaacggccttgcacaaacgcctaagacctgtaaggtccctcactgctgagccggacgggaggtccccgcgcctccccacgtttgtgtgaggctgatggcgcgtcggagtccccggcgctccgcccagtcggcccagactgcagctcccggctgagatgtgtctttgccgccctcttctcccccagagggcccagtatcaagacaagctggcccggcagcgctacgaggaccaactgaagcagcaggtgagctcagcctcccctgcgaggcgcctgcgtccctgagaacgtaggtggctttgtgggaccagtcagtgggtcagaggccacggggcaagaacgatggggttgctgacggtgggtgctagagcaggggaaactactcggacagacacgcaccagcacacgtgtacaggcacacatgcagatgtgtgcacacatgtacacggagacacaggcacctgcccacacagacacacactcctcgcacacacactcccggcagacaggcacacacacccctgcacacatgggcacacacacacccctgcacacacgggcccacacactcccctgcacacatggggaaacatgggcccacacacacacacccctgtgcgcacacacccctacacaggggcatggacagacacccgcaaacacacccccacacaacacgggcacgcacacacacaccccgccacaacacaggcacacatacccctgcacacaggcctgcacatacacccccacacaggggcatgctcacacagcccgcacacacacaggtatgcagacacacccaaacacacatgggtcctcaggcacacactcccgcatggggcatgcacgcacctcccacacacacccgatcacacataggcatgcacacccctctgcacacatgggggcttacacacccccccgcacacgtgggcccgctcacacagcccacacacataccccttcacacaggcacacaccgccccgcacacacgggcctgcacacacacccccacacgggcatgcacacgcccacacacacgggcgcgcacacacccggacatgcacaaacacccacctgcacacacgggcacaccccaccacacacacacacaggcatggacacacgcacaccccctcacacataggcacacatacacaacccaggcacacacccccttgcacagacgggcacgcacacagtcccacacatgggcacacgcgcacaccgccgcaaacacacacacgggcacgtgtacgcacccccactcacagtgtgcctcatacatacgggcacgcacctgcacacgagggcacacccccaccccccacccccacacacccccgcacccatgggcacacacacattactgcacgtgagggcatgcacacacacgccctgcacacccccacacacagaccccttgtgtgggttccacagcagcggctctccaggcacgacaagcctccttgtctcccacccgggcgcccagctggcagtctgggaggttctgcttgggagggctggtcagtggcggcgggcgggtctctgggtctatgagaaaagcttgggtgacatctgttccctggtccttagggaccgtcaccttcagtcctgagctcgcaggcggggttcacatgttgcctgttgtgggcattgtagctttaacgtttaattggcggaagacagaagcttccttaagcccagcctgaatcagggcagtggtgttgggaggtcggcccgcggtggcccttgtcagggaagccacagtgggggctgtttctgccactggggagtttgggaccctgaacccatcccctcagtgactgccgtcccagccgatgtcacccgtgtctgtgtcagggtgcggcgtctgcaggtccccaggtgcccaggacgcttggagttctgtggtcctggggcggacgcaacctctggattggtgttgagcatttttctggttttaaaggcttttctctttttctgcggcttcttctcagcaacttctcaatgaggagaatttacggaagcaggaggagtccgtgcagaagcaggaagccatgcggcgaggtaggctgtctgctctcctggctggggcggaggtggcgggggctgcttgtggatccggcgtgcactctgagcctgagttctgccgcccggcccctcatagctaccagtgcagtgggcgaggcctgctggggctctgcggggtggggctccctctcggaagacacctctgtctgcgagtggacgccaggatctgttcagggagggcaggagctgcttcacttcatgggaagtacaggggccttttttttttttttgagacggagtctcgctctgtcacccaggcaggagtgcaatagcacgatctcagctcactgcaacctctgcctcccaggtttaagcaattctcctgcctcagcctcccgagtagctgggattataggctcccgccaccacgcccagctaatttttttgtatcttcagtagagaaagggtttcactgtgttggccaggctggtcttgaacttcttgatctcattatccgcctgccttggccttccacagtgctgggattacaggcgtgagcctctgcgttctgcctagaacatgggtctttactgtcctggtttcagtggggatcacaggtatttggtgccatgtggcatttgttggcgagtgctccaggcaaacgtctgtcaccactcttcaccgtgggtgggcttgtggcgaggtgtgtgcgtttaatgttcagtagccaggcacgtggcacgtcacgcgtgtctgagttctgacagctgtgtttctgtgtgaggggggcttccttcagaactccgcgttctggttttttgcttcaaagagctcgtcctgagaagttgcctaggcctctgggtcggatttctgccctaatccatgggcagggccggcctgtggcgctgtccctaccaaggtctgtgtgtgtctgtggcacgggcctgtccatggactgggcttgtccgtggagtgggtcggtccatggccttagcctgttggtggcgtgggccggtccacggcatgggcctgtctgtggcgtgggccggtccgtggtgcgggcctgtccgtggccttagcctgttggtggcgtgggccggtccgtggcatgggcctgtctgtggcgttggtctgtccgtggcgtgggccggtccgtggcgtgggccggtccacagtgtgggtggaggtggacgtgctgcactgcatggtgctgagctgccctgcctctctggggcagccaccgtggagcgggagatggagctgcggcacaagaatgagatgctgcgagtggagaccgaggcccgggcgcgcgccaaggccgagcgggagaatgcagacatcatccgcgagcagatccgcctgaaggcgtccgagcaccgtcagaccgtcttggagtccatcaggtgagcactgcccaggcccgggccggccacagatggagccccgcaggtgtgagtcgctggtcccagggcgctctccagctcttccaggcctggccgccataggctgactccttggtgggggcactgcccctctgtcctggcaaggccgtgccgccatgtcagggcctcaccctcaacctgctctcgctgcgtggtacggatcttcgtgtccttcctggtcacaccactgctttccccgcaggacggctggcaccttgtttggggaaggattccgtgcctttgtgacagaccgggacaaagtgacagccacggtaaacatattcataaaacagggctggcaggtggctgagaggcagcatgtgggggcctcctggagccccaggtcctgtccctgccggctctgcacagccctgtagctctcccagcacagagcaaacccacgttgtacctgctgggctcggctgctcctccctccttgagctgggagaaaaaaatgcagttgccagcctgggccacacggtgagaccccatctctacgaagaataaaacattagctgggtgtgatggtggcgcctgtggtcctgctactcgagaggctgaggtaggaggatcacttaagcccaggaggtttgggctgcagtgagccaacattgcaccactgcactccattcttggcgagagaataagaccttgtctcaagaaaaaaatggccaggcggtagtggctcaggcctgtaatcccagcattttcggaggcggaggtgggcggatcacgaggtccggagatcgagatcatcctggtaagagtgaaaccctgtctctactaaaaaaaagaaaaaaaaagaaaagaattagctgggtgtggtgacatgtgcctgtaatctcgggaggctgaggcaggagaatcacttgaacccgggtggtggaggttgcaatgagtcgagatcccgccactgcaccccaagaccagcatgaccaacatggtgaaaccccatctctgctaaaaatacaaaaattagcaggccaaggtggcgtgcgcctggaatcccagctgcttgggaggctgaggtaggaaaattggttgaacccaggaggcggaagttgcagtgagctgaaaccgcacaattgcactccaacctgtggaagaagagcgaaactctgtctcaaaaaaacaaacaaaataaataagccaggcctggtggctcactggtgtaatcccagcactttgggaggccaagacgggtggatcacttgaggtcagaagttcatgaccagcctggccaacatggtgaaaacccatctctactaaaaatacaaaaattggccgggcctcgtggcacaggtctgtattagctgagtgtggtgacctgagcctgtaatcccagtcactcgggaggctgaggcaggagaactgcttgaacctggaaggcggaggttgcagtgagccaagatggcaccattgcactccagcctggccacagaacaaaaccctttctctaaaaacaaagtcaagggcgcattaagcagctccttcatgtcctcaggtgacaccgtctcaccaacatggcaacaccacctgcaacattcaccgtcacgctgaccaggccaccggcaggtgctgcagtcacagcagtgggcgccggcaccacggcagagcaagtgcccactcagtgccgggcacctactgtgtgctgggcggggtggggggacggaggacacagccatgtgcgacctggggcgccaccacagcaggccagagcctgggcacaaaagagcgaggctttaaacgagagaagaatctgaacttcaaactctcagggttttattccgaataacgaaagtttttgcgaaatggagtcgggttcgctttctgggtctttgatttttttttttttgagacagagtctcactttcaagtgtgctgctcaagtgcagtggcgcgatctcgactcactgtcagcttcgcctcttgggttcacaccattctcctgtctcagcctccggagtagctgggactacaggtgtctgtcgccacgcccggctaatttttttgtatttttagtagagagagggtttcatcctgttagccaagatggtttcgatctcctgacctcgtgatccgcccgcgtgggcctcccaaagtgctgggattacgggcgtgagccaccgtgctcagccacagccagctaattttttcatgtttttagtagagacgaggtttttccaggttggttaggctggtcttgaactccaacctctggtgatacgccggccttggcctcccaaagtgctgggattacagacctggccagcctaaacgatttttaaaacaagttagagattttgggttagtcttgttttccaggaataaagtaccatttttagtggccaaggatgtaccagagggtgtggccctgtgacatccagctgggtctgcccagggccccgctcagcgaccgaggctttctaggatttatgctgccagttgcagagaaaatggccctgagtgagggcgttatgactgccccacctgcctcctgtaaccgcgtggctgtgggattcggggctgggaattcgggttcctgtggggccagcacacggccctgtgcttctccctcaggcggagagagggtgggggcagccccgtgcgtctcctgctctaggagggagggacggtgggggccggtgcgccagtgcggtgtctctgctgcaggtggctgggctgacgctgctggctgtcggggtctactcagccaagaatgcgacagccgtcactggccgcttcatcgaggctcggctggggaagccgtccctagtgagggagacgtcccgcatcacggtgctggaggcgctgcggcaccccatccaggtagcggcgcaggcctggccctccctgagtgcagttcctggctgagtcccttctgccccacgagcacagcccacgcacaccctcccgtcccttccctttccccggataacaggcacccgcacgctgcttcacgggtgggttttcctgtctggcgctgtaccttaggggtctgcatcagtgagacccttcccctgtctgcctcggtgtcccttgctcagggctcttgatggggcctgggagcacatcggggtccttgcaagacccgggacttgggtgtgcggccgtctgtcggggaagctgctacaggccatggcgtctggtggcctccctggggagccgcgccgcttgccagcccctgaggtgcctgctctccacaggtcactgggtaggtggttaagaaaataaaagccaataaggaaccggaaaatgcccctaatcccagcaatagcctcctggtctcccggcggggcagggttccagctccgggccggtcctggctgtgctttggggcagctccgtttctgtgtgttaccgagcatgtgtgtgcgttggtggctgttccgtggctgtggcaggtgacccaatggtgcttccccttcccctccggcaggtcagccggcggctcctcagtcgaccccaggacgtgctggagggtgttgtgcttagtgtaagtcggtgtgcctgggaccggggaggtgcagggaggggaccccggagctgggctgggctgtggcccttgctagcgctcgtggtggcgcccaggagcttttgggtcctgagatgcaactgcttggactgtgccggggatagataggctgcccacgagctgggcggcttcctgaggagcagagtccgcacccgggcattcccgcagcccctgtcaccgaggcttccgtgggtgcagagtgtctcccccaaacccccgtcttccccggcagcccagcctggaagcacgggtgcgcgacatcgccatagcaaccaggaacaccaagaagaaccggggcctgtacaggcacatcctgctgtatgggccaccaggcaccgggaagacgctgtttgccaaggtgagagcgcctggctgaacaggtgggccaggggccgctggggtctcacctgcctgcaggtgtctgggggcctcagccgcctggggaatggaccccccttaggcctttgcctaccctcgtgtaggctcagggtgctggtgtgggcagcagcgcctcccatcttccaggcgggggacgtctcctgtctggcaggctgtggcttccagacagggacacccggcaggggctccacactccaggtggagtgtgcaggctttgcagaggcagagggaacatctgttctgtctcccctcactcttcttgtccagaaactcgccctgcactcaggcatggactacgccatcatgacaggcggggacgtggcccccatggggcgggaaggcgtgaccgccatgcacaagctctttgactgggccaataccagccggcgcgggtgagacgtccccacagcatgcaccaggcccttggctgcggcccagcaggctgccttctgggaagggggtccaggtgtctcttggggaccctgtctttctgcagctctgtccttgtggccacgcaggaggcccaatggagggtccctcggagggaaagtcccctgagtgtggaccctggtggacacgaggtccccagcgtgtggaggctgccagtgggatacttggctcagggcagaagggaggtgggtgggtgcagggggagaggggtcttcacagctgcaggggaggctcctccacagccgccctccccccaacacgcctgcaggtgggcgtgggcactggttgccttttctagaaccatttgaaagttagctgaagacagcatggcacactcccttcaataggtcccacagtgaccccgcgcagggcacagcccgggcacccttgtggcctcggctgtcctcgttggaaccacgatcctcatggttggcaccctcccctctggcctttgacctttcactttagaagacctgtccctgcgccaggcgtggtggctcacggctgtaatcccagactttcggaggcggaggcaggcagatacgaggccaggagattgagaccatcctggctaacttggtgaaaccccgtctctactaaaaatacaaaaaattagccaggcatggtggtgggcacctgtagtcccagctactcaggaggctgaggcaggagaatggcgtgaacccgggaggcagagcctgcagtgagccgagattgcgccactgcactccagcctgggagacagagcgagactctgtctcaaaaaaaaaaaaaaagaccctgctccttgcgtggactcttgagcactgcactgggtcgctgtgtgggtgaaacctgcagggcggaggctgttgccccatgtgtggttggctggtgtgtgggtgaaacctgcagggcagagtctgttgccccctgtgtagttggtttcccactgccttctgaggctgagacgtggtcagctgcccagaggccaggctgatcggcttctgtcgagtccaggacttagggctcctgatggggcagagcctgaccccgtggggatctgcctgcctggcctgctcctgccgcggccggacgctgctgtgggctgctcctggcgtcactctcgccttgcttggcctctctctcgttcacagcctcctgctcttcatggatgaagcagacgccttccttcggaagcgagccactgtgagtgtcactaagcctctgtctggccacaggagggtggtcgggtgggcgcggctgtcatcctgggccaggctgcagcccttaagctggcttgcagtggcgcaatcttggctcgctgcaacctctgcctcctgggttcaagctgctctcctgcctcagccccctgagtagctgggattacaggtgtttgccaccacacctagttaagttttttgtatttttagtagagatggggtttcaccatgttggtcaagttggtcaagaactcctgatctcaaatgatctgcccacctggcctcccaaaatgctgggattacatgcgtgatccaccacgcccagccatacagttattattttaatacagggtgtctgtcgcccaggctggagtgcaggggcgacatctccagctcaagcagtcctcctgcctcagcctcccgagaagctgggattgcagaggcacactaacacgcccggctaatttttttgtaacgttagtagagatggagtttcccacattgtccaggcagggctcaaacttctgaactaaagaaattcaccggccttggcctggcacagtggctcacgtgtgtaatcccagcactttgggaggccaaggcaggtggatgacgaggtcaggagttcaagaccagcttggtcaatatggtgaaaccccgtctatagtaaaaatacaaaaattagccgggcgtcgtggggcacgcatgtaatcccagctgctcaggatgctgatgcaggagaatcgcttgaacccaggaggcagaggttgcagtgagctgagatcgtgccactgcactccagactgagagacagaacaagacttcgtctcaaaaaaaaaagcgagagatttgatcgccttgaccttctgaagtgctaggattaaagatgtgagccctcagtcaggctttttttttaaatgtattttttattttttagcaattctcatgcctcagcctcccaagtggcttgagattacaggtgtgccaccatgcatggctaatttttgtatttctagtacagatggggtctcaccatgttggccaggctggtctcaaactccctacctcaggtgatccgcctgcctcagcctcccaaaatgctgggttacatgcttgagccaccgcccctggccctggtcaggattttgagtttagatccatgaaagtgtcgccacgtccctgctccctgcaggagggaggcctgtgggactttctgctctggctgtttacaaggctttgcttctggtgcctaaggctggaaccttctctctgcaggaggagataagcaaggacctcagagccacactgaacgccttcctgtaccacatgggccaacacagcaacaagtgagggagcccctcgggtcctgagcccccgggcagggctgtgcagccgtcgcccttggttcccactgagggtccctggctcacagtgctgggcaccagctgtggcctcagtgtgcccacctcagatgtcccctgggaacggcccagctcgggacagcacggggtgtcattgaggaacatgcaggggcctcccgggcagagctggggtcagtcctgtcttcacggccctgtgcgccgccgccccagcttgcaggtccctctgcccctagatttctgcggtcctgtgcctgcaagggaggtggtctgattgctgccgcccagaggtccccagtagggtgaccggccctatgtccaggctccctcttccctcccaaatcccttaattttgagttttcttggtctcctgggcccctccagccccagtcacgtgtcacacggaggatcaagtcctgctggtcggccgtggctgactcttcaggcacgttgggctcctgggtcagctgctgccgttcgacgctccctggagccctgactcaggtccttcccagagaggcaaggctggggccctgctgagcctctgctgaacccgggcccccgaggtcctgcttctggctcgcatggccataatcttgacagggactctgggtcccgcatccctgctcccagcacagcggggctcaggtagcaggagggagtggtgttcccggcactgcctatcaggctgggcgagggtcagcggggaagtaccacacagggcaagaacagaggcccgagaagccgggcggggggcagctgggcgtggtggggcaggcaggcgggtgaccagggctgtggctgcgttctccccatgtttcctgtgctcacaagctgccgctttagattctcccaaaaagtctccccgagggggctgaggagcccccgttgccctcggggcatctcagctggcagccccagcgtttccttccccatccctgtcctacagattcatgctggtcctggccagcaatctgcctgagcagttcgactgtgccatcaacagccgcattgacgtgatggtccacttcgacctgccgcagcaggaggagcgggagcgcctggtgagactgcattttgacaactgtgttcttaagccggccacagaaggaaaacggtgagtgtcccgcctcacccggcccccaatccaggcaccatatggcatgggtgtaggccagctgcctgtcttccggcctccacctcatggtgtggggtccgcggccttggctgcctcacttgggaactccttccccaggcgcctgaagctggcccagtttgactacgggaggaagtgctcggaggtcgctcggctgacggagggcatgtcgggccgggagatcgctcagctggccgtgtcctggcaggtgagtcaggctccggcacgtccacccagacgggaccccagctgctgtggagatgctcagttgcgccaggcctgtcccagcaccggtgtcatgtgggagcttctgttgaggggttttcagtgcacagacgtgacacagggccccctgcctcagtcgggccactccacgcagcagcgtgcacctgctcgtgccctcaggagggtggggccatgttggttgctgacagtcacacggggctctctggaagccagtccagcatcccaggtgcccgggctctgctgggtgtggtgggaggtttctggctctcatcttggccaacaggcacctcctagagggaatggtcgtcaggacaggccccgtgtgagttgggtggtgggggtggagggacgttgtgtttcctggaccaggtcccttggcttggtcctgtttgacgggttcagacacacggtgggactggcctccgattgtcccacagttagttgttcctcggaggcacccctcctgctgctccttggatactccagggccgaggagccgagactcactggagtgtgggcatggccatccagagagctctgatcaggccgggcgcggtggctcacgcctgcaatcccagcactttgggaggctgaggcaggcatatcacggggtcagattgagaccatcctggccaatatgtcgaaaccccgtctctactaaaaatacaaaaattagctgagtttggtggtgcatgcctgttatcccagccacacgggaggctgaggcagaagaattgcttgacccggggagttggaggttgcaatgagccaagatcgcaccaccgcactccagcctggccaaagattgagactccatctcaaaataaaagaaagctttggtctttgggggttgctgaaaaagcaaaaccaggtctgtggggtagaaggcgccctggccacacacaggcattgccgcctctggggtccgcagagtctgtgtgacaacctggtcactcgatctagcagcgtatttgaatgaatgagtgacagcttaatgaagtagccaagtaccttgatttgaacgtaggagccggggtatgtagggagctgtattagtcagtacaggctgggttatgccgctgtgacaaagagtcccagatctcaaaccccgtccttgtgggtcagctgaggtctctgttccaggccgtccccacttggaaccaggtctgtttccacaactcagaaagtggaggctgggtatggtggtggctgacgcttgtattcccagcatttggggaggccaagtcagtcagattatttgaagccaggggttcaggaccagcctggaaagcaaggtgagaccccatctctacaaaaaatgaaaaaattggccggacctagtggcacatgcctgtaatgccagctgcttgggaggctgaggtgggagggtcacttgagtccaggaggcggaggctgcagtgagctgtgattgtgccactgcactccagcctgggttacagagcaagaccctgtcttaaaaactgagaataatttggaacaagcccggtggctcactcctgtaatcccagcatgttgggaggccaaggagagaagatcacttgaggtcaggagttcaagaccaccctggccaacatgatgaaccccacctctacaaaaaatacgaaaattagctgggtgtggtggtgggtgcctgtaatcccagctactcaggaggctgaggcaggagaattgcttgaacccacgaggcagaggatgcggtgagctgagatcatgccactgcactgtagcctgagggacagagtgagactgtctcaaaaataataataagaagaataataatttgggctgggcacagtggcacatgcctgtaatcccagcactttgggaggccgaggtgttggatcacttgaggtcaggagttcgaggccagcctggccagtgtgccgagaccccacctctactaaaaatacaaaaattaactggacggggccgggtgtggtgacttatgcctctaatcccagcactttgggaggccgaggtgggcggatcacggggtcaggagttcaagaccagcctggacaacatggtgaaaccccatctctactaaaaaataaaaaaattatccaggcgtggtggctggcgcctgtagtcccagctactcaggaggctgaggcaggaggatcgcttgaacccgggaggtggaggttgcagtgagctgagatggtgccactgcactccatcctgggtgtcagagcgatactccatctccaaaaaaaaaaaaaagaaagaaattaacctggtgtggtagcaggcacctgtaatcccagctgctcgggaggctgagtcaggagaattgctggaactcaggaggcagaggttgcagtgagctaagatcacgccacagcactccagtctgggcgacagagcgaaactgtctcaaaatataaatgataacagtaataatttggcttggcacggtggctcttacatgtagcattttctacacataagattatgtcacctgagaacaggtgattttacctctcccttttcagtttggatgacttttctttttcttgtcccatatctctggccagagcttccagcgatatgtggaatagaagtggtcagaattcttgcttggttctttctcagaggaagctttcagtttttcaccactgagtatgttagctgtggacttgtgatcgctggccttctttgtgtttagggcatgttcttcaatcctggtttgttaattttttttgtttcttttcttttcttttggtggggggaccagtctcgcttttgccgcccaggctggagtgcagtagagacagggtttcaccatgttggccaggctggtctcgaactcctgacgtcaggtgacctgcccacctcagcctcccaaagtgctgggattacaggtgtgagccactgcaaccgaccagttgaattttttttttttaatcataaaagtgtgttgaattttgtcaaatgcttttcctgcatgagatgagagggtcatgtggtttccttcctccactctgctaatattgattgattttcatatattgaactatccttgcattccaggaatgaatcctgcttggttagggtgtagagtcctttaactatactgctaaattcgttttgctggcattttgttgaggactttcccagtgaggctcatcagggatattggcctgccatttctcttgtggtgtgtttgtctggctttaatatgagggtaatgctggcttcctaggatgagtgaggaaatgttcttcaatttgtccaagagtttgaggagtggtactgattcttcttaatgttttgtgaattcacatgtgaagaaatcaggtccaggtcttctctttgaccttttatagcttgaagatcttaggttcccagaaaaattgcaagggtagcacagagagctcccgggcccggggccttcccacatggtgaacatcatgtgtcactgttggacccacccgcgaccaggttttgccccagaatcccacccaggaggccacgtgacatttagctgtcacttctggtgggctcctgccaggtcccgtgcttcctggaggggtggccctgtgagcatctgcgtagcccctctcctctgctgggccctgggtgacgtgcagccactcgggtggaccctgagggtccctgcacctgtttgccctctcttgggtgggctcaagaccaaaaatgatgttgagcagtcctgggcccctgagccacagtggcggtgcggctccggtcagtgtctcctgcgctcccgggcccccgacccacagtggcggtccggctctggtcagtgtctcctgcgctcccgggcccccgacccacagtggcggtccggctccggtcggtgtctccccacacagtggctcttggcgaggggtgggcgctggcagaggggacgggcaccacgtggtcatccccatgacaggttctgtcatggtgacagtgttgtgggaggatggtgtgctgctgcccctgcaccccgtgagatgaatcctgcctctgggaggtacagctgggacggggcgagggacccactcagctgtccaggaagggtcccctgccctgtgcttcctccaggtgtcctggtgcactcctgagcacggcacctagtgggggtccccacaccctcaccctgacccatgggtgcctccccttggggactccacgcccttcgctggcactgagatggagagcgacctgtccgtggcagaagggctgctgcacctgaggtgcctaaggcgacaccaagggccacagccccagtagctccagcctccgtgtgctcaatgccaagccctgtgcccaggaggacagggaaatggaggcagaggtggccttgatgtcccaaggtgggcagtggctgcctctgccctggaggcctgtgagggtcagggtctgagggtctgaggtgcactatgacccgggggcactgcctggccacggctgagactcgcagagggtctgcagttcccacctgcctctcggaagctgccctgggtcagccgtcagtggtgctccgccttgggttttctattatcagaaagtcattgagcaacagcagtgctgaggacgcaggcagggctgtgggcactgcaggggccgctcccagtgtccacacgcgtgctgggctctgccaaggtgtgggaagcctgtgtttcaccctgaggttgtcctggtgcccctggtttggcccctccccacctcggggccctggcgtgcattaagggtggcgggttcccatagcggcctccctcagctccctctctcttcactaggccacggcatatgcctccaaggacggggtcctcactgaggccatgatggacgcctgtgtgcaagatgctgtccagcagtaccgacagaagatgcgctggctgaaggcggaggggcctgggcgcggggtcgagcaccccctatccggagtccaaggcgagaccctcacctcatggagcctggccacggacccctcctacccctgccttgccggcccctgcacatttaggatatgctcctggatggggactgggctgtgcccagggcctctgtcccccaggatgtcttgtggtggcggtcggccgttctgccccccagggcaccccctgttgtaggcactggctagggaggggcaggcctccttcctgcccctcgagacactcttgggagatgcattttccgtctggctcacagggggagggtgaggctttgtaccccagcccctgcccaggccactgtgagggtgggtgctggctgagcccctggggcagaaggagtggggcaggcggggtctttgttctcggctcccacagcagagccaggtgagggggggcctgccaggactagacagaagtggggcggcctgaaccctgcttccagccatggccaggggccacggaacccggcaggggtgtctgaggccgccctgtcagctggccggtccaagcctgtggctggagctggtgtgtgtttatctaataaagtcccacaggtgcctcacc

SEQ ID NO: 1784 - DNA, 24533 bp, Homo sapiens
ccggctgcggcgcgtggagctgctcccagccgcgctcgagtcagactcgggtgggggtcccggcggcggtagcggcggcggcggtgcgagcatgtcgtggctcttcggcgttaacaagggccccaagggtgaaggcgcggggccgccgccgcctttgccgcccgcgcagcccgggccgagggcggggggaccgcggcttgggagaccgccggcgcccaaggacaaatggagcaacttcgacccccacacaaaaaataggaccaaggcggcgcgcgagctggagcactcgcgtgagtgcggcggggcggggcgggcgggcgggcgggacgggccggggaagcgggagccctggccttgccgctcctcgctgctgtcggcagccacttcccgggcgagactgcgcccccggagcaccccccgccggagccgtctcgcgtgccgggaggatcggactctttccgtcacccgtttgcacctctgcagctgtcaggagcgggtcaggtgcgaaaagcggtgcggaggtggcgctcataggttacaggggtcagggtctggggctggccgtggtcttcagttaccgccgagcgtgcgggatccttctgcgcttgccgcctccacgtggcacaggccaaggcgtggccagatgggtagatgggtttgttgggtggttgctagcagtttccacgtaacaagggaagcgtatttgagagttacttgattctaacgagactagcagatttgcacttcttgttggaagacgttagcatttgcacggcgaggtctgtgaagcacaggccaggccgtgctgctcagcttgagtaaacccctgacccaaggccctcagggtgtgagcactgactgcaccttccctaagctcgggtctcttcccccagccttcctttcccctgtggctttaacgatttgtagcacgatgcagttcaaatggctaggagtctggaacgtagaaggtgctgaattcattgaaagaatacagtggttctcaactcttgtttaagccggggttctttctatttatttatatattgagacacagtatcgccctgtcgccgaggctggagtgcagtggtgcgatttcggctccctgcaacctccgcctccgattctcctgccgcagcctctcgagtagctgggattacagccgcgcagcaccacgcccggctaattttttttgtatctttagtagagacgggtttcaccatgttggccagggtgctctccaactcctgacctcgtgatccgcccgccttgtcctcctgaagtgctgggattacaggcctgagccacagcgcccagacagaagggattccttttttttttttttttttttttttttgagatgagtctcgctctgtcgcccaggctggagtgcagtgacgtgatctccactcactgcaagctccgcctcccgtgttcacaccattctcctgcctcagcctcccgaatagctgggagtacaggcgcccgccaccacgcccggctaattttgtagagatggggtttcaccgtgttagccaggatggtctcgatctcctgacctcgtgattaattttttgtatttttagtagagacggggtttcactgtattagccagggtggtctcgatctcctgacctcgtggtccacccgcctcggcctcccaaagtgctgggattacaggcgtgagccaccgcatgccacctttttttttttaagatgatgtcttgctctttggccaggctggagtgcaatggcgccatcttgtctcactgcaaaccgcaacgccctggttcaaagaattctgctgcctcagcctcccaagtagctgggattacaggcacgcgccaccacgcccagctaatttttgtatttttagtagagacgtggtttcaccaccttggccagggtggtcttgaccacctgaccccgtgatccacccgcctcgacctcccaaagtgatgagattacagtcctgagccaccgcaccttgccagcaggggttcctttttagaaagaagatcatttagggaatccctggtgtgaagcagatataaacagagtttccctgtttaaggagggatggcctggtggtacttgtggttccatcctgtgcccttccccggggtgctggggaacatcctgagctgaggtttctggccccggctgggtctcataaccccagagggacattcaggtttgggcccaggcccaggctaacatggatagtcctagctgggcaccaccgacagtgcgtgttctgttttgaagagatggggtcttgctttgtcgcccagtctggccttgacctcctgggtaaaagccgtccaaccgtctcagcctcctgaggagaggggactgcaggcttgctcggtaatttttcttttttcttttctttttttcttttttttttgacggagtctcgctgtcgcccaggctggagtgcagtggcgtgatcacggctcactgcaagctccacctcctgggtacacgccattctcctgcctcagcctcccgagtagctgggactacaagtgcccgccgccacgcccagctaattttttgtattttttttagagaccggttttcaccatgttagccagaatggtctcgatctcctgaccccgtgatccacccgcctcggccacccaaagtgctgggattacagacgtgagccaccgcgcccggctttgctccgtaatttttctgtgtgtttttgagactgagtctggctctgccgcccaggctggaatgcagtggcatcatctctgctcactgcaacctttgcctttggggttcaagcgattctcctgcctcagcctcccgagtagctgggatcacaggcgcccgccagcacacctggctaatttttgtgtttttttactagagacggggtttcaccatgttgtttaggctggtcttgaattctggcctcaggtgattcgcccacctcggcctcccaaagcgctgggatgacaggcgtgagccgctgctcatggccttcctcggtaattttaacgatcaggttaggatgggaatcaagggctggacttcagggcacctcggaggacagcggatgttggtgactgactttcttgctgcaggcttatttggagggttcctttgtgtcctagttcctgggggttttcacccgctaacttcacttagagattgaaacttctcccacttccagaagctgaatcgtagtgatcagcctgcggccccctgcagtggtacaggcctggttgagcagcctcaggccgcctccccatagtgcagacctgtgcctctgagttgctccagtcctggcggccccggagctcctgacccgcagtccgctctgccggcgttgccagtgccttggtctgccctctctgtggtggagcggggcccggggcagggtctccaggtgcaccgtggggagccctccatcaggcttttgtttcctgtggattgtgttccaggtgtgggctctttcattttgatcccttctctccttcctggcctcactgctggcgggtgagagaggtttctccggagttgactgccccctttccccgggtgccccctgccctgcccctctgcctggtagcccctctgcaagcccggcccctcccgacgctcctggcttcctccgtgcccctttcctggcagcggggtcgccgagattcgcccgttgctttgtccttgctgctctccaggcaaacgggcggctcctcctcaccgactgcctcctctgtcccttgaggctatagccccatgccgcctcgttcccagagtctgccctgacccctcctccggcctgtccttggaagtcacagcagtacattatcccagaactgtctgtgagcaccagcgctcgccctgcactccacagagggggtgcctggaggagagcctcgtgccctgtgggtgtgaattcacgcgctgggacgcacgtccctggcacagggtcacaccaaagtggtgaatgattgttctcattctaataaccgagaggccacacgggcacctgacctgctctttcccctctcctcctccccagagtcactgggggtgggaactgtcaatgagccattttcaggggagggagtggcctcagcttaatccagccaaaggtcccctcgggaggaaacaggcagagctcctcaccgtgacacccacgttcctgtcactgctctgtggcaggaccctgggggactgacacaccctcagtcccctcggggtcagagtgagagtggttgagagcccggggtcgcttcagcccttggcttcccgagcttagcagccaaacccgttgacctggcactgtcttccctgagaggcaggtcccggtctcatctgtgctctgttcactggggcccccgaggttagctaccaaggcgcttcctgaaatgtgacgctgatgcccgtcagcccagttcgtgcctaaccacaggcccaagcagacccaccccaacaccaaagcgtcgctgcctctgtctaaatgcaacgagtgctccccacggcacttccccctgcgtcagtcacctccaaaaattacacctgagctgagaacagacgctgggctctagttagtgacgtgtttgctgcagttgactctgaaggcttaaaaaagtgagacgggctgcgggaggaagagagacgggaacaacgcaccaacccaggagcatcgggggtccctgcctactttacacgtctttctgtgttagaataatttttttttttttgagacggactcttgctgtctcccccgctggagtgcattgcttcgatctctgctcactgcaagctctgcctcccaggttcacgccattctcctgcctcagcctcctgagtagctaggactacaagtgcccgccgccacgcccggctaattttttgtatttttagtagagacggggtttcactgtgttaaccaggatggtcttgatctcctgacctcatgatccacccgcctcagcctcccaaagtgctgggattacaggcgtgagccaccacgccctgctagaataatttttttttagagacggagttgcgctctgttgccccggctggagtgcggtggtgcgatctcggctcgctgcaagctctgcctcccaggttccagcaattctccagccttggcctccccagtagctgagatcacaggcgtgcaccaccacacccagcttttttttgtgtttttagtggagacaggatttcgccatgttggccaggttggagattttatttttcttaagtctcactctgtccagctggagtgcagcagtgtgatctgggtgactgtagcctctgcctccggggttcaagccatcctcccacctgagcctcagagttgctgggattacaggcgtgaaccaccgcttcccactaggtttttgtatttttagtagaggttgggtttcaccatgttggccaggctttggtatccgtgtatcctacacctgctctccgtgccacatgcgcccgcaggttacgccaaggaggccctgaatctggcgcagatgcaggagcagacgctgcagttggagcaacagtccaagctcaaagtgagtggggccggtgtgggcgaggaggccggggcgcacatggggttcaggcgtggagattggtggggctgctactggtgggtagggccaggggcgtgtacatgggcagcagtggggccagggccgagcttgggcgcctcatttcacagagggaaacaaggggaggtgagagacgctgccacagagccgcccgagagggagggtcagtgttggtgagggcgtctggtcgtcctgagggagggccggtgttggtgagggcatctggtcgtcctgagggagggggtcttcttcacattctcacctcatttcttttcactcagcaggattttttattttattttattttattttattttattttattttattttattttatttattttgaaacggagtctcactcttgcctaggctggagtgcaatggcgcaatctcggctcactgcaacctccgcctcccgggttcaagcgattcatctgcctcagcctctggagtagctgggattacaggcacgcgccaccacgcctggctaatgttgtattttagtagagacggggtttctccatgttggtcaggctggtctctaactcccgacctcaggtgatccacccgcctcggcctctcaaactgttgggattacaggcatgtgccaccacgcctggctaatgttgtattttagtagagacggggtttctccatgttggtcaggctggtctctaactcccgacctcaggtgatccacccgcctcggcctctcaaactgctgggattacaggcacgcgccaccacgcctggcctattttattttattttgagacagagtgtcactctgtcccccagtctggcgtgcaatggtttgatctcggctcactgcaacctccacctcccgggttcaacctcctgcctcagccttccgagcagctgggactacaggagcctgccaccacatctggcgaatttttgtatttttagtagagaagggggttcagcatgttgtccaggttggtcttgaactcctgacctcaggtgatccagccactttggcctcacaaagtgctgggattataggcaagagcgatggcgcccggcccactcagcaggattcctagaatgggcacgagctctgccctcatcacagtccaaaagtgagcacctgcctggagctgcccagaaacagccttgtggggtggggttggtgtctgaccttcctccccgggggccttcgcaggcttctctgctggtgcttctgtgcctgtgggtctggattcctccagggcctgatcctgggtgcagatgcagctggaagccctgaacctgctgcacacactagtctgggcacggagtctctgccgtgccggagctgtgcagacacaggagcggctgtcaggcagtgccagccctgagcaagtgccagctggtgagtgctgtgctctgcaggagtatgaggccgccgtggagcagctcaagagcgagcagatccgggcgcaggctgaggagaggaggaagaccctgagcgaggagacccggcagcaccaggccgtaagagcgcaagaggccgcgagggaggcgcccggctgcggggagcggcctggggcaggactgggagctgggtgtggtcccggggcactctggagtcagccattagagctgccctcggaacggccttgcacaaacgcctaagacctgtaaggtccctcactgctgagccggacgggaggtccccgcgcctccccacgtttgtgtgaggctgatggcgcgtcggagtccccggcgctccgcccagtcggcccagactgcagctcccggctgagatgtgtctttgccgccctcttctccccagagggcccagtatcaagacaagctggcccggcagcgctacgaggaccaactgaagcagcaggtgagctcagcctcccctgcgaggcgcctgcgtccctgagaacgtaggtggctttgtgggaccagtcagtgggtcagaggccacggggcaagaacgctggggttgctgacggtgggtgctagagcaggggaaactactcggacagacacgcaccagcacacgtgtacaggcacacatgcagatgtgtgcacacatgtacacggagacacaggcacctgcccacacggacacacactcctcgcacacacactcccggcagacaggcacacacacccctgcacacatgggcacacacacacccctgcacacacgggcccacacactcccctgcacacatggggaaacatgggcccacacacacacacccctgtgcgcacacacccctacacaggggcatggacagacacccgcaaacacacccccacacaacacgggcacgcacacacacaccccgccacaacacaggcacacatacccctgcacacaggcctgcacatacacccccacacaggggcatgctcacgcagcccgcacacacacaggtatgcagacacacccaaacacacatgggtccgcaggcacacactcccgcatggggcatgcacgcaccccccacacacacccgatcacacataggcatgcacacccctctgcacacatgggggcttacacacccccccgcacacgtgggcccgctcacacagcccacacacataccccttcacacaggcacacaccgccccgcacacacgggcctgcacacacacccccacacgggcatgcacacgcccacacacacgggcgcgcacacacccggacatgcacaaacacccacctgcacacacgggcacaccccaccacacacacacacaggcatggacacacgcacaccccctcacacataggcacacatacacaacccaggcacacacccccttgcacagacgggcacgcacacagtcccacacatgggcacacgcgcacacccccgcaaacacacacacgggcacgtgtacgcacccccactcacagtgtgcctcatacatacgggcacgcacctgcacacgagggcacacccccaccccccacccccacacacccccgcacccatgggcacacacacattactgcacgtgagggcatgcacacacacgccctgcacacccccacacacagaccccttgtgtgggttccacagcagcggctctccaggcacgacaagcctccttgtctcccacccgggcgcccagctggcagtctgggaggttctgcttgggagggctggtcagtggcggcgggcgggtctctgggtctatgagaaaagcttgggtgacatctgttccctggtccttagggaccgtcaccttcagtcctgagctcgcaggcggggttcacatgttgcctgttgtgggcattgtagctttaacgtttaattggcggaagacagaagcttccttaagcccagcctgaatcagggcagtggtgttgggaggtcggcccgcggtggcccttgtcagggaagccacagtgggggctgtttctgccactggggagtttgggaccctgaacccatcccctcagtgactgccgtcccagccgatgtcacccgtgtctgtgtcagggtgcggcgtctgcaggtccccaggtgcccaggacgcttggagttctgtggtcctggggcggacgcaacctctggattggtgttgagcatttttctggttttaaaggcttttctctttttctgcggcttcttctcagcaacttctcaatgaggagaatttacggaagcaggaggagtccgtgcagaagcaggaagccatgcggcgaggtaggctgtctgctctcctggctggggcggaggtggcgggggctgcttgtggacccggcgtgcactctgagcctgagttctgccgcccggcccctcatagctaccagtgcagtgggcgaggcctgctggggctccgcggggtggggctgcctctcggaagacacctctgtctgcgagtggacgccaggatctgttcagggagggcaggagctgcttcacttcatgggaagtacaggggcctttgttttttttttgagacggagtctcgctctgtcacccaggcaggagtgcaatagcacgatctcagctcactgcaacctctgcctcccaggtttaagcaattctcctgcctcagcctcccgagtagctgggattataggctcccgccaccacgcccagctaatttttttgtatcttcagtagagaaagggtttcactgtgttggccaggctggtcttgaacttcttgatctcattatccgcctgccttggccttccacagtgctgggattacaggcgtgagcctctgcgttctgcctagaacatgggtctttactgtcctggtttcagtggggatcacaggtatttggtgccatgtggcatttgttggcgagtgctccaggcaaacgtctgtcaccactcttcactgtgggtgggcttgtggcgaggtgtgtgcgtttaatgttcagtagccaggcacgtggcacgtcacgcgtgtctgagttctgacagctgtgtttctgtgtgaggggggcttccttcagaactccgcgttctggttttttgcttcaaagagctcgtcctgagaagttgcctaggcctctgggtcggatttctgccctaatccatgggcagggccggcctgtggcgctgtccctaccaaggtctgtgtgtgtctgtggcacgggcctgtccatggactgggcttgtccgtggagtgggtcggtccatggccttagcctgttggtggcgtgggccggtccacggcatgggcctgtctgtggcgtgggccggtccgtggtgtgggcctgtccgtggccttagcctgttggtggcgtgggccggtccgtggcatgggcctgtctgtggcgttggtctgtccgtggcgtgggccggtccgtggcgtgggccggtccacagtgtgggtggaggtggacgtgctgcactgcatggtgctgagctgccctacctctctggggcagccaccgtggagcgggagatggagctgcggcacaagaatgagatgctgcgagtggagaccgaggcccgggcgcgcgccaaggccgagcgggagaatgcagacatcatccgcgagcagatccgcctgaaggcgtccgagcaccgtcagaccgtcttggagtccatcaggtgagcactgccgaggcccgggccggccacagatggagccccgcaggtgtgagtcgctggtcccagggcgctctccagctcttccaggcctggccgccgtaggctgactccttggtgggggcactgcctcctgtcctggcaaggccgtgccgccatgtcagggcctcaccctcaacctgctctcgctgcgtggtacggatcttcgtgtccttcctggtcacaccactgctttccccgcaggacggctggcaccttgtttggggaaggattccgtgcctttgtgacagaccgggacaaagtgacagccacggtaaacatactcataaaacagggctggcaggtggctgagaggcagcatgtgggggcctcctggagccccaggtcctgtccctgccggctctgcacagccctgtagctctcccagcacagagcaaacccacgttgtacctgctgggctcggctgctcctccctccttgagctgggagaaaaaaatgcagttgccagcctgggccacacggtgagaccccatctctacgaagaataaaacattagctgggtgtgatggtggcgcctgtggtcctgctactcgagaggctgaggtaggaggatcacttaagcccaggaggtttgggctgcagtgagccaacattgcaccactgcactccattcttggcgagagaataagaccttgtctcaagaaaaaaatggccaggcggtagtggctcaggcctgtaatcccagcattttcggaggcggaggtgggcggatcacgaggtccggagatcgagatcatcctggtaagagtgaaaccctgtctctactaaaaaaaagaaaaaaaaagaaaaaaattagctgggtgtggtgacatgtgcctgtaatctcgggaggctgaggcaggagaatcacttgaacccgggtggtggaggttgcaatgagtcgagatcccgccactgcaccccaagaccagcatgaccaacatggtgaaaccccatctctgctaaaaatacaaaaattagcaggccaaggtggcgtgcgcctggaatcccagctgcttgggaggctgaggtaggaaaattggttgaacccaggaggcggaagttgcagtgagctgaaaccgcacaattgcactccaacctgtggaagaagagcgaaactctgtctcaaaaaaacaaacaaaataaataagccaggcctggtggctcactggtgtaatcccagcactttgggaggccaagacgggtggatcacttgaggtcagaagttcatgaccagcctggccaacatggtgaaaacccatctctactaaaaatacaaaaattggccgggcctcgtggcacaggtctgtattagctgagtgtggtgacctgagcctgtaatcccagtcactcgggaggctgaggcaggagaactgcttgaacctggaaggcggaggttgcagtgagccaagatggcaccattgcactccagcctggccacagaacaaaaccctttctctaaaaacaaagtcaagggcgcattaagcagctccttcatgttctcaggtgacaccgtctcaccaacatggcaacaccacctgcaacattcaccgtcacactgaccaggccaccggcaggtgctgcagtcacagcagtgggcgccggcaccacggcagagcaagtgcccactcagtgccgggcacctactgtgtgctgggcggggtggggggacggaggacacagccatgtgcgacctggggcgccaccacagcaggccagagcctgggcacaaaagagcgaggctttaaacgagagaagaatctgaacttcaaactctcagggttttattccgaataacgaaagtttttgcgaaatggagtcgggttcgctttctgggtctttgatttttttttttttgagacagagtctcactttcaagtgtgctgctcaagtgcagtggcgcgatctcgactcactgtcagcttcgcctcttgggttcacaccattctcctgtctcagcctccggagtagctgggactacaggtgtctgtcgccacgcccggctaatttttttgtatttttagtagagagagggtttcatcctgttagccaagatggtttcgatctcctgacctcgtgaatccgccgcgtgggcctcccaaagtgctgggattacgggcgtgagccaccgtgctcagccacagccagctaattttttcatgtttttagtagagacgaggtttttccaggttggttaggctggtcttgaactccaacctctggtgatacgccggccttggcctcccaaagtgctgggattacagacctggccagcctaaacgatttttaaaacaagttagagattttgggttagtcttgttttccaggaataaagtaccatttttagtggccaaggatgtaccagagggtgtggccctgtgacatccagctgggtctgcccagggccccgctcagcgaccgaggctttctaggatttatgctgccagttgcagagaaaatggccctgagtgagggcgttatgactgccccacctgcctcctgtaaccgcgtggctgtgggattcggggctgggaattcgggttcctgtggggccagcacacggccctgtgcttctccctcaggcggagagagggtgggggcagccccgtgcgtctcctgctctaggagggagggacggtgggggccggtgcgccagtgcggtgtctctgctgcaggtggctgggctgacgctgctggctgtcggggtctactcagccaagaatgcgacagccgtcactggccgcttcatcgaggctcggctggggaagccgtccctagtgagggagacgtcccgcatcacggtgctggaggcgctgcggcaccccatccaggtagcggcgcaggcctggccctccctgagtgcagttcctggctgagtcccttctgccccacgagcacagcccacgcacaccctcccgtcccttccctttccccggataacaggcacccgcacgctgcttcacgggtgggttttcctgtctggcgctgtaccttaggggtctgcatcagtgagacccttcccctgtctgcctcggtgtcccttgctcagggctcttgatggggcctgggagcacatcggggtccttgcaagacccgggacttgggtgtgcggccgtctgtcggggaagctgctacaggccatggcgtctggtggcctccctggggagccgcgccgcttgccagcccctgaggtgcctgctctccacaggtcactgggtaggtggttaagaaaataaaagccaataaggaaccggaaaatgccccaatcccagcaatagcctcctggtctcccggcggggcagggttccagctccgggccggtcctggctgtgctttggggcagctccgtttctgtgtgttaccgagcatgtgtgtgcgttggtggctgttccgtggctgtggcaggtgacccaatggtgcttccccttcccctccggcaggtcagccggcggctcctcagtcgaccccaggacgtgctggagggtgttgtgcttagtgtaagtcggtgtgcctgggaccggggaggtgcagggaggggaccccggagctgggctgggctgtggcccttgctagcgctcgtggtggcgcccaggagcttttgggtcctgagatgcaactgcttggactgtgccggggatagataggctgcccacgagctgggcggcttcctgaggagcagagtccgcacccgggcattcccgcagcccctgtcaccgaggcttccgtgggtgcagagtgtctcccccaaacccccgtcttccccggcagcccagcctggaagcacgggtgcgcgacatcgccatagcaacaaggaacaccaagaagaaccggggcctgtacaggcacatcctgctgtatgggccaccaggcaccgggaagacgctgtttgccaaggtgagagcgcctggctgaacaggtgggccaggggccgctggggtctcacctgcctgcaggtgtctgggggcctcagccgcctggggaatggaccccccttaggcctttgcctaccctcgtgtaggctcagggtgctggtgtgggcagcagcgcctcccatcttccaggcgggggacgtctcctgtctggcaggctgtggcttccagacagggacacccggcaggggctccacactccaggtggagtgtgcaggctttgcagaggcagagggaacatctgttctgtctcccctcactcttcttgtccagaaactcgccctgcactcaggcatggactacgccatcatgacaggcggggacgtggcccccatggggcaggaaggcgtgaccgccatgcacaagctctttgactgggccaataccagccggcgcgggtgagacgtccccacagcatgcaccaggcccttggctgcggcccagcaggctgccttctgggaagggggtccaggtgtctcttggggaccctgtctttctgcagctctgtccttgtggccacgcaggaggcccaatggagggtccctcggagggaaagtcccctgagtgtggaccctggtggacacgaggtccccagcgtgtggaggctgccagtgggatacttggctcagggcagaagggaggtgggtgggtgcagggggagaggggtcttcacagctgcaggggaggctcctccacagccgccctccccccaacacgcctgcaggtgggcgtgggcactggttgccttttctagaaccatttgaaagttagctgaagacagcatggcacactcccttcaataggtcccacagtgaccccgcgcagggcacagcccgggcacccttgtggcctcggctgtcctcgttggaaccacgatcctcatggttggcaccctcccctctggcctttgacctttcactttagaagacctgtccctgcgccaggcgtggtggctcacggctgtaatcccagactttcggaggcggaggcaggcagatacgaggccaggagattgagaccatcctggctaacttggtgaaaccccgtctctactaaaaatacaaaaaattagccaggcatggtggtgggcacctgtagtcccagctactcaggaggctgaggcaggagaatggcgtgaacccgggaggcagagcctgcagtgagccgagattgcgccactgcactccagcctgggagacagagcgagactctgtctcaaaaaaaaaaaaaaagaccctgctccttgcgtggactcttgagcactgcactgggtcgctgtgtgggtgaaacctgcagggcggaggctgttgccccatgtgtggttggctggtgtgtgggtgaaacctgcagggcagagtctgttgccccctgtgtagttggtttcccactgccttctgaggctgagacgtggtcagctgcccagaggccaggctgatcggcttctgtcgagtccaggacttagggctcctgatggggcagagcctgaccccgtggggatctgcctgcctggcctgctcctgccgcggccggacgctgctgtgggctgctcctggcgtcactctcgccttgcttggcctctctctcgttcacagcctcctgctcttcatggatgaagcggacgccttccttcggaagcgagccactgtgagtgtcactaagcctctgtctggccacaggagggtggtcgggtgggcgcggctgtcatcctgggccaggctgcagcccttaagctggcttgcagtggcgcaatcttggctcgctgcaacctctgcctcctgggttcaagctgctctcctgcctcagccccctgagtagctgggattacaggtgtttgccaccacacctagttaagttttttgtatttttagtagagatggggtttcaccatgttggtcaagttggtcaagaactcctgatctcaaatgatctgcccacctggcctcccaaaatgctgggattacatgcgtgatccaccacgcccagccatacagttattattttaatacagggtgtctgtcgcccaggctggagtgcaggggcgacatctccagctcaagcagtcctcctgcctcagcctcccgagaagctgggattgcagaggcacactaacacgcccggctaatttttttgtaacgttagtagagatggagtttcccacattgtccaggcagggctcaaacttctgaactaaagaaattcaccggccttggcctggcacagtggctcacgtgtgtaatcccagcactttgggaggccaaggcaggtggatgacgaggtcaggagttcaagaccagcttggtcaatatggtgaaaccccgtctatagtaaaaatacaaaaattagccgggcgtcgtggggcacgcatgtaatcccagctgctcgggatgctgatgcaggagaatcgcttgaacccaggaggcagaggttgcagtgagctgagatcgtgccactgcactccagactgagagacagaacaagacttcgtctcaaaaaaaaaaagcgagagatttgatcgccttgaccttctgaagtgctaggattaaagatgtgagccctcagtcaggctttttttttaaatgtattttttattttttagcaattctcatgcctcagcctcccaagtggcttgagattacaggtgtgccaccatgcatggctaatttttgtatttctagtacagatggggtctcaccatgttggccaggctggtctcaaactccctacctcaggtgatccgcctgcctcagcctcccaaaatgctgggttacatgcttgagccaccgcccctggccctggtcaggattttgagtttagatccatgaaagtgtcgccacgtccctgctccctgcaggagggaggcctgtgggactttctgctctggctgtttacaaggctttgcttctggtgcctaaggctggaaccttctctctgcaggaggagataagcaaggacctcagagccacactgaacgccttcctgtaccacatgggccaacacagcaacaagtgagggagcccctcgggtcctgagcccccgggcagggctgtgcagccgtcgcccttggttcccactgagggtccctggctcacagtgctgggcaccagctgtggcctcagtgtgcccacctcagatgtcccctgggaacggcccagctcgggacagcacggggtgtcattgaggaacatgcaggggcctcccgggcagagctggggtcagtcctgtcttcacggccctgtgcgccgccgccccagcttgcaggtccctctgcccctagatttctgcggtcctgtgcctgcaagggaggtggtctgattgctgccgcccagaggtccccagtagggtgaccggccctatgtccaggctccctcttccctcccaaatcccttaattttgagttttcttggtctcctgggcccctccagccccagtcacgtgtcacacggaggatcaagtcctgctggtcggccgtggctgactcttcaggcacgttgggctcctgggtcagctgctgccgttcgacgctccctggagccctgactcaggtccttcccagagaggcaaggctggggccctgctgagcctctgctgaacccgggcccccgaggtcctgcttctggctcgcatggccataatcttgacagggactctgggtccgcatccctgctcccagcacagcgggctcaggtagcaggagggagtggtgttcccggcactgcctatcaggctgggcgacggtcagcggggaagtaccacacggggcgagaacagaggcccgagaagccgggcggggggcagctgggcgtggtggggcaggcaggcgggtgaccagggctgtggcgcgttctccccatgtttcctgtgctcacaagctgccgctttagattctcccaaaaagtctccccgagggggctgaggagccgttttgccctcggcgatctcagctggcagccccagcgtttccttccccatccctgtcctacagattcatgctggtcctggccagcaatctgcctgagcagttcgactgtgccatcaacagccgcatcgacgtgatggtccacttcgacctgccgcagcaggaggagcgggacgcctggtgagactgcattttgacaactgtgttcttaagccggccacagaaggaaaacggtgagtgtcccgcctcacccggcccccaatccaggcaccatatggcatgggtgtaggccagctgcctgtcttccggcctccacctcatggtgtggggtccgcggccttggctgcctcacttgggaactccttccccaggcgcctgaagctggcccagtttgactacgggaggaagtgctcggaggtcgctcggctgacggagggcatgtcgggccgggagatcgctcagctggccgtgtcctggcaggtgagtcaggctccggcacgtccacccagacgggaccccagctgctgtggagatgctcagttgcgccaggcctgtcccagcaccggtgtcatgtgggagcttctgttgaggggttttcagtgcacagacgtgacacagggccccctgcctcagtcgggccactccacgcagcagcgtgcacctgctcgtgccctcaggagggtggggccatgttggttgctgacagtcacacggggctctctggaagccagtccagcatcccaggtgcccgggctctgctgggtgtggtgggaggtttctggctctcatcttggccaacaggcacctcctagagggaatggtcgtcaggacaggccccgtgtgagttgggtggtgggggtggagggacgttgtgtttcctggaccaggtcccttggcttggtcctgtttgacgggttcagacacacggtgggactggcctccgattgtcccacagttagttgttcctcggaggcacccctcctgctgctccttggatactccagggccgaggagccgagactcactggagtgtgggcatggccatccagagagctctgatcaggccgggcgcggtggctcacgcctgcaatcccagcactttgggaggctgaggcaggcatatcacggggtcagattgagaccatcctggccaatatgtcgaaaccccgtctctactaaaaatacaaaaattagctgagtttggtggtgcatgcctgttatcccagccacacgggaggctgaggcagaagaattgcttgacccggggagttggaggttgcaatgagccaagatcgcaccaccgcactccagcctggccaaagattgagactccatctcaaaataaaagaaagctttggtctttgggggttgctgaaaaagcaaaaccaggtctgtggggtagaaggcgccctggccacacacaggcattgccgcctctggggtccgcagagtctgtgtgacaacctggtcactcgatctagcagcgtatttgaatgaatgagtgacagcttaatgaagtagccaagtaccttgatttgaacgtaggagccggggtatgtagggagctgtattagtcagtacaggctgggttatgccgctgtgacaaagagtcccagatctcaaaccccgtccttgtgggtcagctgaggtctctgttccaggccgtccccacttggaaccaggtctgtttccacaactcagaaagtggaggctgggtatggtggtggctgacgcttgtattcccagcatttggggaggccaagtcagtcagattatttgaagccaggggttcaggaccagcctggaaagcaaggtgagaccccatctctacaaaaaatgaaaaaattggccggacctagtggcacatgcctgtaatgccagctgcttgggaggctgaggtgggagggtcacttgagtccaggaggcggaggctgcagtgagctgtgattgtgccactgcactccagcctgggttacagagcaagaccctgtcttaaaaactgagaataatttggaacaagcccggtggctcactcctgtaatcccagcatgttgggaggccaaggagagaagatcacttgaggtcaggagttcaagaccagcctggccaacatgatgaaccccacctctacaaaaaatacgaaaattagctgggtgtggtggtgggtgcctgtaatcccagctactcaggaggctgaggcaggagaattgcttgaacccacgaggcagaggatgcggtgagctgagatcatgccactgcactgtagcctgagggacagagtgagactgtctcaaaaataataataagaagaataataatttgggctgggcacagtggcacatgcctgtaatcccagcactttgggaggccgaggtgttggatcacttgaggtcaggagttcgaggccagcctggccagtgtgccgagacccccacctctactaaaaatacaaaaattaactggacggggccgggtgtggtgacttatgcctctaatcccagcactttgggaggccgaggtgggcggatcacggggtcaggagttcaagaccagcctggacaacatggtgaaaccccatctctactaaaaaataaaaaaattatccaggcgtggtggctggcgcctgtagtcccagctactcaggaggctgaggcaggagaatcgcttgaacccgggaggtggaggttgcagtgagctgagatggtgccactgcactccatcctgggtgtcagagcgatactccatctccaaaaaaaaaaaaaaagaaagaaattaacctggtgtggtagcaggcacctgtaatcccagctgctcgggaggctgagtcaggagaattgctggaactcaggaggcagaggttgcagtgagctaagatcacgccacagcactccagtctgggcgacagagcgaaactgtctcaaaatataaatgataacagtaataatttggcttggcacggtggctcttacatgtagcattttctacacataagattatgtcacctgagaacaggtgattttacctctcccttttcagtttggatgacttttctttttcttgtcccatatctctggccagagcttccagcgatatgtggaatagaagtggtcagaattcttgcttggttctttctcagaggaagctttcagtttttcaccactgagtatgttagctgtggacttgtgatcgctggccttctttgtgtttagggcatgttcttcaatcctggtttgttaattttttttgtttcttttcttttcttttggtggggggaccagtctcgcttttgccgcccaggctggagtgcagtagagacagggtttcaccatgttggccaggctggtctcgaactcctgacgtcaggtgacctgcccacctcagcctcccaaagtgctgggattacaggtgtgagccactgcaaccgaccagttgaattttttttttttaatcataaaagtgtgttgaattttgtcaaatgcttttcctgcatgagatgagagggtcatgtggtttccttcctccactctgctaatattgattgattttcatatattgaactatccttgcattccaggaatgaatcctgcttggttagggtgtagagtcctttaactatactgctaaattcgttttgctggcattttgttgaggactttcccagtgaggctcatcagggatattggcctgccatttctcttgtggtgtgtttgtctggctttaatatgagggtaatgctggcttcctaggatgagtgaggaaatgttcttcaatttgtccaagagtttgaggagtggtactgattcttcttaatgttttgtgaattcacatgtgaagaaatcaggtccaggtcttctctttgaccttttatagcttgaagatcttaggttcccagaaaaattgcaagggtagcacagagagctcccgggcccggggccttcccacatggtgaacatcatgtgtcactgttggacccacccgcgaccaggttttgccccagaatcccacccaggaggccacgtgacatttagctgtcacttctggtgggctcctgccaggtcccgtgcttcctggaggggtggccctgtgagcatctgcgtagcccctctcctctgctgggccctgggtgacgtgcagccactcgggtggaccctgagggtccctgcacctgtttgccctctcttgggtgggctcaagaccaaaaatgatgttgagcagtcctgggcccctgagccacagtggcggtgcggctccggtcagtgtctcctgcgctcccgggcccccgacccacagtggcggtccggctctggtcagtgtctcctgcgctcccgggcccccgacccacagtggcggtccggctccggtcggtgtctccccacacagtggctcttggcgaggggtgggcgctggcagaggggacgggcaccacgtggtcatccccatgacaggttctgtcatggtgacagtgttgtgggaggatggtgtgctgctgcccctgcaccccgtgagatgaatcctgcctctgggaggtacagctgggacggggcgagggacccactcagctgtccaggaagggtcccctgccctgtgcttcctccaggtgtcctggtgcactcctgagcacggcacctagtgggggtccccacaccctcaccctgacccatgggtgcctccccttggggactccacgcccttcgctggcactgagatggagagcgacctgtccgtggcagaagggctgctgcacctgaggtgcctaaggcgacaccaagggccacagccccagtagctccagcctccgtgtgctcaatgccaagccctgtgcccaggaggacagggaaatggaggcagaggtggccttgatgtcccaaggtgggcagtggctgcctctgccctggaggcctgtgagggtcagggtctgagggtctgaggtgcactatgacccgggggcactgcctggccacggctgagactcgcagagggtctgcagttcccacctgcctctcggaagctgccctgggtcagccgtcagtggtgctccgccttgggttttctattatcagaaagtcattgagcaacagcagtgctgaggacgcaggcagggctgtgggcactgcagggccgctgccagtgtccacatgcgtgctggctctgccaaggtgtgggaagcctgtgtttcaccctgaggttgtcctggtgcccctggtttggcccctccccacctcggggccctggcgtgcattaagggtggcgggttcccatagcggcctccctcagctccctctctcttcactaggccacggcatatgcctccaaggacggggtcctcactgaggccatgatggacgcctgtgtgcaagatgctgtccagcagtaccgacagaagatgcgctggctgaaggcggaggggcctgggcgcggggtcgagcaccccctatccggagtccaaggcgagaccctcacctcatggagcctggccacggacccctcctacccctgccttgccggcccctgcacatttaggatatgctcctggatggggactgggctgtgcagggacctctgtcccccaggatgtcttgtggtggcggtcggccgttctgccccccagggcaccccctgttgtaggcactggctagggaggggcaggcctccttcctgcccctcgagacactcttgggagatgcattttccgtctggctcacagggggagggtgaggctttgtaccccagcccctgcccaggccactgtgagggtgggtgctggctgagcccctgggcgagaaggagtggggcaggcggggtctttgttctcggctcccacagcagagccaggtgagggggggcctgccaggactagacagaagtggggcggcctgaaccctgcttccagccatggccaggggccacggaacccggcaggggtgtctgaggccgccctgtcagctggccggtccaagcctgtggctggagctggtgtgtgtttatctaataaagtcccacaggtgcctcacc

SEQ ID NO: 1785 - DNA, 490 bp, Homo sapiens
atgtcaactactgactagaactggtggaaaaggttgtttactgaaactgcgaggaaggtagactttaaaatgcaggacaaagactgaacatactgatatactgattctttgaagggaagtttagaactcattgtatctaacattattcaggcttaaaacagtttccaatccagtgggaaaagtcactccatatattccgtgaagtcaaccagttccatcaaggagaaagtcagggccgctgggagcgcgtggaccgtgggctccggggcggcgcctgcccgggcaccccggccccgtccacgccccgcaagaggagctcgctggccccgccacgcgggaaggggtcgccccggggtcttgggcgggagggccgtgcgggctgcggagacaccgaggaggggaggcgcctctcctgagctcttggcgcagcgaccccagggcgccgactcatcgcggaagggctcggcttgcccgggcgccggtgccgcct

SEQ ID NO: 1786 - DNA, 318 bp, Homo sapiens
aactggtggaaaaagttgtttattgcaactgcgaggaagttagactttaaaatgcagaacaaagactgaacatactgacataccggttctttgaagggaaatttagaattcattgtatataacattattcaggcttaaaatagtttccaatccagtgggacgagtcactccatataattctgtgaagtcaaccattcctatcaaggagagagtcggggccgccgcgagcgcgtgaaccgtgggctccggggtggtgccgacgcggctgcgggccgggactgacgttgcgccgggttcgagtactcccctccggagttt

SEQ ID NO: 1787 - DNA, 2121 bp, Homo sapiens
accttaaaataagtttttaggagagtaatatatattcatgggattgtgagggagcattgtagagctgttttcttctcagtcatagtggtggttttcctagctgctatggaaaggtttgttcacttatgagattaggacttttcttaaattcctcattaaatatgaacctaaggcatacccatcatttaccttgattcccatataatttgtgtaagtcatatataagtccattgacaaaataaaaaaataaataattggattccttgtatcaacagaaagccttgtgcttaaaacctgttattcttctttgagccagactaaacagtaacatttacaaaatggtatcagctcaacattaaatctaaggttacttctcacatacatcataaagtcagccatcatctttcatttaggatttcttggggttttctttttgcatatatagattatgtattacttaaatccaaaatacatgtgtgtatatatatacatatatatgtaacttaatataaatgtttgatgagttatctcaattgactataatcttctaagtcaaaaagaaaacatttaagtacataatataaaaagaactgaacattaacagtaatgggaaattcataatggctaaatatgaaataagctttgtctttgcagttacaaactaattcttgtacattttccttttcactaaaaaaataactaattgatagtttccattcacatgaacaagttataatcaggtttgggatagtatgcccaaaacctatgtttctttactttatattcttaaaatctgagacatgatttttctggaacaaattaagatttcatgtacaatagagtccctttcctaatactgttatgaagaaaccaagttgactaccttatgagagatcagatatttcccttatctcattatattcacagcatatgtttggacatgcgtttcaccaagaaccatgtagtaataagataaatggtaactgaggtactatggaatttttagaacttgattccccaggacatgctacagtaaactaaactatttattcaaaagtaacccaactaattaaagtgaaaaaaaattgttgaatcacaatgaacaaacataaaacaatacttaaatgagaattctgtgtcttttttggttttatctgtgatttattttgtccagtattaaggaatggttatctttatcattcttctaacatgttttggtttctctaatggttcattttcctttagcttgtgaaaattagggcagtttgtccagagccttactcgcaggagacaccagacccaacccatgcttagatttctgttaataaaagggagaagggtatttgaataggtagtaaaggcaggtacaagtttaagggagcagggctatcatatgtactaggtgagatttctataaatgtctgaaaagttacatgcatagtcattggctcaggtaatttctctgaatttgaacttatttgatttatttaaccaagttattataatatgcagttctctttaatcaatcttctattattcaatcatctatccatttattaattcaacaaatatttattaaagtgcctaccatgattatgtgctgtagaaaagacaaggacatttactaggggggattgtgggcccaatcggcatcataagcatgtctgaagcaaaagacaataatcacatccaacggcaccagttcagctcaactttagaattcagcagtaacagtacagatggcctaaagtacatctgtgtgtatctgtacgtgtgcacacacccatgtatatatatttatctatctgtacaaacactacatatgtatacacactatctatgtaaaatataatatatgtataatgcatataaattctaacaagtgtatttgtgttatctttaaaatagaacaattgtatcttgaagtggtaaatgcagagaattggttttattgttgatctgtggatttaatgatttctaggtgaaaaggacgtttaagtgtacaatttcttttcttaatttaatatatttatgtaaatgcatgcctgaaatttggttagattggctgtgttttgtgtcttttaacatgatcaaatgattaaactttatcttatgacttga

SEQ ID NO: 1788 - DNA, 2122 bp, Homo sapiens
accttaaaataagtttttaggagagtaatatatattcatgggattgtgagggagcattgtagagctgttttcttctcagtcatagtggtggttttcctagctgctatggaaaggtttgttcacttatgagattaggacttttcttaaattcctcattaaatatgaacctaaggcatacccatcatttaccttgattcccatataatttgtataagtcatatataagtccattgacaaaataaaaaaataaataattggattccttgtatcaacagaaagccttgtgcttaaaacctgttattcttctttgagccagactaaacagtaacatttacaaaatggtatcagctcaacattaaatctaaggttacttctcacatacatcataaagtcagccatcatctttcatttaggatttcttggggttttctttttgcatatatagattatgtattacttaaatccaaaatacatgtgtgtatatatatacatatatatgtaacttaatataaatgtttgatgagttatctcaattgactataatcttctaagtcaaaaagaaaacatttaagtacataatataaaaagaactgaacattaacagtaatgggaaattcataatggctaaatatgaaataagctttgtctttgcagttacaaactaattcttgtacattttccttttcactaaaaaaataactaattgatagtttccattcacatgaacaagttataatcaggtttgggatagtatgcccaaaacctatgtttctttactttatattcttaaaatctgagacatgatttttctggaacaaattaagatttcatgtacaatagagtccctttcctaatactgttatgaagaaaccaagttgactaccttatgagagatcagatatttcccttatctcattatattcacagcatatgtttggacatgcgtttcaccaagaaccatgtagtaataagataaatggtaactgaggtactatggaatttttagaacttgattccccaggacatgctacagtaaactaaactatttattcaaaagtaacccaactaattaaagtgaaaaaaaattgttgaatcacaatgaacaaacataaaacaatacttaaatgagaattctgtgtcttttttggttttatctgtgatttattttgtccagtattaaggaatggttatctttatcattcttctaacatgttttggtttctctaatggttcattttcctttagcttgtgaaaattagggcagtttgtccagagccttactcgcaggagacaccagacccaacccatgcttagatttctgttaataaaagggagaagggtatttgaataggtagtaaaggcaggtacaagtttaagggagcagggctatcatatgtactaggtgagatttctataaatgtctgaaaagttacatgcatagtcattggctcaggtaatttctctgaatttgaacttatttgatttatttaaccaagttattataatatgcagttctctttaatcaatcttctattattcaatcatctatccatttattaattcaacaaatatttattaaagtgcctaccatgattatgtgctgtagaaaagacaaggacatttactagggggggattgtgggcccaatcggcatcataagcatgtctgaagcaaaagacaataatcacatccaacggcaccagttcagctcaactttagaattcagcagtaacagtacagatggcctaaagtacatctgtgtgtatctgtacgtgtgcacacacccatgtatatatatttatctatctgtacaaacactacatatgtatacacactatctatgtaaaatataatatatgtataatgcatataaattctaacaagtgtatttgtgttatctttaaaatagaacaattgtatcttgaagtggtaaatgcagagaattggttttattgttgatctgtggatttaatgatttctaggtgaaaaggacgtttaagtgtacaatttcttttcttaatttaatatatttatgtaaatgcatgcctgaaatttggttagattggctgtgttttgtgtcttttaacatgatcaaatgattaaactttatcttatgacttga

SEQ ID NO: 1789 - DNA, 573 bp, Homo sapiens
tttttttggtttctttttttttttttttgagacggagccttgctatgttgcccaggctgcagagcagcacaatctcagctcactacaacctccgcctcccgggttcaagcaattctcctgcctcagcctcccaagtagctgggattacaggtgcccgccaccacacccggctaatttttttgtgtttttagtagagacagggtttcaccatgttggccaggctgatttcaaactccagacttcaagtgatccagccccccaggcctcccaaagtgctaggattacaggcgtgagccaacatgcccggcttccatttgcttttgatattgtttttatctctgagttacaaactatacaagcttaccaggtataaggttagatgctacatctaggagcattcaagatatacattaatttaaacttttattagtctaactttctgttaagtctcttagctttgaaacataaaagagaaatcaagcccaaatttttagaggaaggctaaggtatactattggcagttgtagttttaattgtaattgactgattaaccaagtaatttataaaatgtta

SEQ ID NO: 1790 - DNA, 2410 bp, Homo sapiens
  misc_feature (1314)..(1314): n equals a,t,g, or c
  misc_feature (1320)..(1320): n equals a,t,g, or c
  misc_feature (1327)..(1327): n equals a,t,g, or c
tctttctttctttttctttcttttttttttttttttttttaccaagtcttgctctgtcgccaagcgggagtgcagtggcactatctcggctcactgcaacctctgcctcccggttcaagcgattctcctgcctcagcctcccaattagctgggaagctgggagtacagacaggcaccaccatgcccagctaatttttgtatttttagtagagatggggtttcaccatgttggccacgatggtctcaatctcttgacctcatgacctgcccaccttggcctcctaaagttctgggattacaggcatgaaccaccgcacccagtcagagttttcactcttgttgcccaggctggagtgcaatggcgcgatctaggctcactgcaacctacacctcctgggttctccctcagcttcccaagtaggtgagattacaggcacccgccaccacgcctggctaatttttgtatttttagtacagtcggggtttcaccatgttggccaggctgttctcaaactcctgacctcaggtgatcccccagcctcggactcccaaagtgctggggttataggcatgacccaccatgcctggctgatacaaatattaataagaatgacagaccagtgagaagagagatgatgtggtggaactaaaaacggacatgatgagatctttaagaggacacattaagaaactattatcttggataccttgtgatcacaataaaatgaggttagatgggtcctacttccaaacgtggaatgtaaaccttaaatttctaaggcagtggagaagtggaaacttcacagttgtcactaaaagacttcatagctcacaccggtactatcacaattctcagctgccaatttccccaggattttgacagttaatgtgacagatatgtctataaaatcactcctttacactcacttttttaatagaaaagttgaaactaatgttctatttccaatggaaatacaatttaaaataccagccacacataatatctcatcagtaaaaaatagtttttttctatttggagttctaaagaggactctctgaagattaaatcctattatcattcgaagaaatgagaggataaaagaaaggaaaacaatttggataaaatattttttctacatttttataatttccatgcagtattttctttttttctttttttttttttattattatacttcaagttttagggtacatgtgcacattgtgcaggttagttacatatgtatacatgtgccatgccggtgcgctgcacccaccaactcgtcatctagcattaggtatatctcccaatgntatccntcccccnctccccctccccaccacagtccccagagtgtgatattccccttcctgtgtccatgtgatctcattgttcaattcccacctatgagtgagaatatgcggtgtttggttttttgttcttggcgatagtttactgagaatgatggtttccaatttcatccatgtccctacaaaggacatgaactcatcattttttatggctgcatagtattccatggtgtatatgtgccacattttcttaatccagtctatcattattggacatttgggttggttccaagtctttgctattgtgaataatgccgcaataaacatgcgtgtgcatgtgtctttatagcagcatgatttatagtcctttgggtatatacccagtaatgggatggctgggtcaaatggtatttctattcaagatggattaaagatttaaacgttagacctaaaaccataaaaaccctagaagaaaacctaggcattaccattcaggacataggcgtgggcaaggacttcatgtccaaaacaccaaaagcaatggcaacaaaagccaaaattgacaaatgggatctaattaaactaaagagcttctgcacagcaaaagaaactaccatcagagtgaacaggcaacctacaacatgggagaaaattttcgcaacctactcatctgacaaagggctaatatccagaatctacaatgaactcaaacaaatttacaagaaaaaaacaaacaaccccatcaaaaagtgggcgaaggacatgaacagacacttctcaaaagaagacatttatgcagccaaaaaatacatgaaaaaatgctcatcatcactggccatcagagaaatgcaaatcaaaaccactatgagatatcatctcacaccagttagaatggcaatcattaaaaagtcaggaaacaacaggtgctggagaggatgtggagaaataggaaactcttacactgttggtgggactgtaaactagttcaaccattgtggaagtcagtgtggcgattcctcagggatctagaaccatgcagtattttctatgattaaaataaacaaacactttaaaagggaaaaggagaggggaaggagaa

SEQ ID NO: 1791 - DNA, 573 bp, Homo sapiens
tttttttggtttctttttttttttttttgagacggagccttgctatgttgcccaggctgcagagcagcacaatctcagctcactacaacctccgcctcccgggttcaagcaattctcctgcctcagcctcccaagtagctgggattacaggtgcccgccaccacacccggctaatttttttgtgtttttagtagagacagggtttcaccatgttggccaggctgatttcaaactccagacttcaagtgatccagccccccaggcctcccaaagtgctaggattacaggcgtgagccaccatgcccagcttccatttgcttttgatattgtttttatctctgagttacaaactatacaagcttaccaggtataaggttagatgctacatctaggagcattcaagatatacattaatttaaacttttattagtctaactttctgttaagtctcttagctttgaaacataaaagagaaatcaagcccaaatttttagaggaaggctaaggtatactattggcagttgtagttttaattgtaattgactgattaaccaagtaatttataaaatgtta

SEQ ID NO: 1792 - DNA, 17646 bp, Homo sapiens
gtttgtaaatattatctctgtggtttttgtcctgcggaattgttcacaaatacacgttctgatcttggtaagtgaattttctgtgtaacttttatcaaatttatgatatttaaaatgttgaataggagtggtgaaaggaaaaaaactgattataattctgtgaagttttttcttaaagatttgctaataagtaatttcttacttggtttagatatttgaatgtattaataaatgtcagtctgattaaacatggtggcttaattaaacatacatgtctatttccactccctcccaaaactccacttaaatgaaaaaaattttaaaaagatgtatttggaagaggagataacattagagatgtcagcaaatttttggaagatgacaagtggatggaggagtagcagcaaacgcaacagagcagagcaacctgtaccctaaaagcctgcagaaggggatactaaacagaagcgagtgtttgatcagcagaaccctggacaggctcaggatttggaggcaccaggtaccacagaaggcagggttgagtcatggggctgaaaatgagagagattagtctgtagtctagttcagggtttctcaaccttgacattgttgacattttgagccagttttggagggggcttttcatgcattgtgggatgtttagcaacatctctggcctttacccactagataaccagtagcaccccctgttgtgacaccccaaaatgtcttcagacattgccagatgtcccccaggatgcaaaattgccactagtgtaggtggtcctgtgcatctgttgatcttactctcctccccatagaccccaggagaagagagggttattttctggagaaattggactagagagactagtttatctgaaccacaaaatagaaaaaaataattgactatttcctcaattctctcaaggatggtacataaccaggatcattctggatacataaaagaagtcaattcattatgtacaatctttgccttagagcattaggagcatattaaggcaggaccagtctagatcttgagatttcagacacagcaggggcagtagtaagttaaaaaaagaatgtaaaacagagtaaatgaatctatatttttattggtggggctctcctctgccctgttcctagaaggatacagccagatgtttttccccaggcagaagaaaagaggattcttctctagagaaagtgaacagttcctgagaagtgatctctgcaggtactgacccttggggaatctcttaaaagaaagtcttactgcctgattttcctatgataaagcccattcatgagctgacaaaccctgcctaatccctactaacttccagtcagattttggaagtgtctttttaaaaaattagttgcttgccaaggaccaccagccagacgttcgaagaaagccttcaacacaagagattaacaaaaccaacagagaaagaagaatttagtggaattggagataatggggaaagcagaagagagattcttcaaaatcttaagaaatttagtatcttcagagacatatgagaagacactatattcttcagcaataatacgatgccataaagagggaacttgtggaaaaagtgaaaaacattttctgaaaaacagctcttagaaattaaaactgaagaaatagaactaaaatcaccagaaagatttgaaaataaaattaaggaaatttactggaatattgggcagtacgacagaaggatttttaaaaaacttagtccaggaactgtactaccagcttaatagttgtggacagaataaaagcagagggaattgcttaagaaaaaaaatttgcagtactaaaggacattcatctttaggttgagcaggtcctacaagtgatcaggacagtgaatgaaaaagatccatacctaggcatacccctgtgaaattttagaacacgggggtggtgggggtgggtgtaggtcacagaattatgaatcagaatggcctaagactggtcagtaacaacgggggaagttgaagacattggagaaacatcctcagggtgctgagtgaaaatgtgtctgccggagggggaaaaagacattttcagatatacagggtctcaactgatttatctcccacgggccttttctcaggaaactccaccaaaacatgtccataaaccgagaaagaggaaagaaaaaacaagagatccagtaattctcatctactacagagcagaaaaggaattcatcaggacaataattctatagtgagcttagaaaataagtatcccagattgaagtaaggcagaaggcccatggaagaaaatgaaactgatgatgtgatatattttgagtcatatgtgaaattagtattgagatagtttctatagctgagtttgaagtgtttgagaagaatttgaaaatatagagaaaaaactaggctcacacctgtaatcccagcacttttggaggcaaaggagggcagatcactcgaggtgaggagttcaagaacagcttgcccaacagggtgaaatcctgtctctactaaaaatacaaaaaaattacgcaggcatggtggtgggtgcctgtaatcctagctccttggaaggttgaggcaggagaatcccttgaacctggtgggcagaagttgcggtgagccaaaattgcgccgctgcactccggcctgggcgacagagcaagactctatctcaaaaaaaacaaaacaacaacaacaacaacagaaaacatcagaagtgtctcataatgagcctttgtttggcctgacagtgaatagtacttgcataatataagcaccaagtgtttatttatccaaaaattttgatgtctaggattgataaatagcaaaataagcatagaattttaaaaggtggaggtaaattcgggaagaaatagagaagagttaagataattgctttttagaggtgggaagaagtaggggttaggtactagtctagtgctatttgactttatatacagatttgaaaataataaagtcggcaatggttcagttcagtggtctgtccccatcagttttctttagtggcaataaggaacagtttcctttcaccttccctccttttctccctccctcctttacttctcttttaaccatatatggttgctgtccattatattgactttgaagactgagcagatcaattttatatcctatttggttatgatgcttcatgatttagtaggatcagtttagatgtctacaaactactcagtgataaagtgaatcctttttctttttaaaaagaaaaataactctttttttttggcaagaaaaggttgctaataatcacagataatttatacaattatattttttcccccaggtccgtgtgaaaaaattcatgatgaaaatctacgaaaacagtaagttattttgcttgtcatttccacccccccagttattagttggtttaagtgggacaagggttgaggaataattgcaattaaatgtaaaatgagtgtctgagagaagtccagtcagtggctggggatagtaagaaagttctatagcttcagtaatgatactgatagctaccacatgagtgcaccctgtatgtcagactttttttttctgtagcccatttgctgttttttttaaatgagcctcactgtgtcgctcaggctggagtgcagtggcatgatctcagcttactgcaacctccgcctcccaggttcaagggattctcctgcctcaaactcccgagtagttgggattacaggtgcccaccaccatgcctgactaatattttgtatttttagtagagacagggtttcaccatgttggccaggctggtctcaaactgctgacctcaagtgatccacccacctcggcctcccaaagtgctgggattacaggcgtgagccaccatgcccagccccgattttatccatgagacttgtcctaggtccagggtcatagatccagtacagtggtaaagctagtggttaaacccctgtgtaaagctctatgatgaggggcaatcagaaagtcacttcaaatacacctggtttaccctgcagcctaaatggaatagtcgttgaggctagttaagatagaatatttgagttgtaatggctgaagatttggaaatgagtacttgtttattttcatgttaccaggtatgagaagagctctcgtttcatgaaagttggctatgagagagattttttgcgatacttacagagcttacttgcagaagtagaacgtaggatcagacgaggccatgctcgtttggcattatctcaaaaccagcagtcttctggggtaagtgaagtcaattcagtctttgtaaacggtccttgttttctggagattcagagacctccctaatatttttgaaacttgtcttctgttcattactttgttctttaaaatgatatgaaacttatagggcattcattttttttccagtctttattagcaaacataacactgattttgctaaccataagatttttctttgtttttatttttcttgaggccaagatttttcccttaaatagtagtaactgacaatatgtgattgaccaacagaagttgaagataattgaattactatcctttcaattaagcattttaattattaaatagaaatattatgtatggtatgtgcaagtttgcatgtttatctttgttttcaacttgttggtaatacgttttattgtcttcaataggccgctggcccaacaggcaaaaatgaagaaaaaattcaggttctaacagacaaaattgatgtacttctgcaacaggtgagaattgtgtgcattaatgtcaggaagtaatgtgaaacagacatgtaaccagcaaaaatacaaggatgggccaggcatggtaactcatgtgtataatcccagcactttgggaggccgaggcgggaggattgcttgagccggagaatttgagaccagtctgggcaacaaagtgagacccagtctttacaaaaattagccaggtgcaatggcgtgtacctgtggtcccagctacacacgaggctgagttaggagaattgcttaagcctacaagggcgaggctgtagttagacgtgtctgtgccactgcactccagcttgggcaacagagtgagacctcgtcttgtgtgtgtgtgtgtgtgtacatgtacatatatatgtatctgaaaggacagcaaatatgaaaagacgctcaacactattagtcgttagggaaatacagattaaaactgcaatcaaatacctatttgacacctatgagaatagctaaaattaaactgatcataccagctattggcaaggatgtgagccagctggaactggggtataatattgcacaaccactttggaaaaaatagtctcatttttttctttcatattcctgtagatgatattggagtctgttttgttgtcgttgttactgtttttttgacagtcttgctttgtcacccatgctggagtgcagtggtgcgatctcagctcactgcaacctctgcctcccaggttcaaatgattctcctgcctcagcctcccgagtagctgggattacaggtgtgcgccaccatccccggctgattgttgtatttttaatagagatggggtttcaccgtgctggccaagctggtctcaaattcctgacctcaagtaatccgcccaccttggcttcccaaagtgttgagattacaggtgtaagccactgtgcctggccctggagtctcttaaaaagttaaaaatgtaccatatgccattctactcccaaatatttatccaagagaaatgaaaacatatgtctacacaaagatttacactccagtgttcatgagtgctatattcataatggcacaaaaaaaataaaacccagactggaatcaattaaaatacccatcagcaggtgagtggataattaaatcatgatgtatctatatggtggaatgcctgtcagtaataaaagggaattagctacatgagacaatatgggtggatcttaaaataattaggctgagtgaaagaagccggacaaaaaaggaatatagactctatgactctatataaaattttagaaaatgcatattaacctacagtgacagaaagcagatctgtggttgcctggggattgtgtttaggattcaggctggaggaggtactgaaaagagtaggtggctcacacctgtaatcccagcactttgggaggattgcttgagcccagcagttcaaaaccagcctgggcaacatagtgagacgctgtctttccttttttttaaaaaaaaaaacagagtctcacgtcatcatccaggctggagtgcagtggcacgatcttggctcactgcagcctcctcctcctgggttcaagcaattcttctgcctcagtctccccagtagctgggattacaggtgcccaccaccatgcctggctaattttttttttttatatttttagtagagatggggtttcaccatgttggccaggctggtcttgaattcctgacctcaggtgatctgcccaccttggcctcccaaagtgcttggattacaggcatgagccatcgcgtctggccgaaagtgcatttttcttaacacatcagttatactttattgaagtataaaaaaaatccaggataaattaaacccaaagaggcttttgtaaatgaaaccaaacaaaaaagatggaaaacaaccactaatgaaccatggggaaaaaagacaatagttgggtttgaaagaaatcttaactgtttttttcccctactcttctaagattgaagaattagggtctgaaggaaaagtagaagaagcccaggggatgatgaaattagttgagcaattaaaagaagagagagaactgctaaggtccacaacgtcggtgagtaaaccttatttcacattatctcatctgtctgttaacagttagtaggaactcatttttatttgagaacctttgaaaactgatgttccaaacttagagtcagcacaatttgtagcccacaaggtctgtggcatctactaagctctgcctttgtgcagtatgcaagcaactttatatagtacaagaaacaaatgggtgtggttgtatcccaataaaatgttagcaaaaggcctctctggcttgccaatcactgccttaaaccataaattttcatatgagcctggttttattttcatttttgttgtaataaattactcagtacatacttacatctttgttaaaaattaatacacccttaaatatctaattcttttaattggagaatagaatatacttgtttcagatactattgattgcagaatgtaattggtcattggttcctccatattgaataggatatgttcagattatagtcaatgtgcttagttccttaattagttttgtatatggacattattccttgaacctaagcaaggaatgtattcatactaaaataggtggctttctgaaaggtgatttaaattttgtaaggtaatgtgggtgttgaacattgaacagtgggtctcaacatttcttctggatgattcagtaagttagttgctgttaccttaaacatccctctctaaaagttgaccacttgtagtccaatattactgatttggggaaatggaaaagagcaattcacacacattagaaatcttttctaaatgttgagtactttcctgggatttgtttctcttcctcagatgttcttaaaataactgatttatcattttagacaattgaaagctttgctgcacaagaaaaacaaatggaagtttgtgaagtatgtggagcctttttaatagtaggagatgcccagtcccgggtagatgaccatttgatgggaaaacaacacatgggctatgccaaaattaaagctactgtagaagaattaaaagtaagtttttttgtttgttttgaggcagattcttgctctgtcacctagagtgcagtgacgcgatctcagctcactgccacctccacctcccaggtttaagcaattctcatgcctcagcctcctgagtagctgggagtacaggcatgtgccaccaggcctggctaatttttgtttgtttgtttgtttgtttatttttgagacagtctcgctttgttacccaggctgaagtacagtggcgtgatctcggctcaccgcaacctccacctctggggttcaagcaattctcatgcctcagcttcctgagtagctgggattacaggcacacactaccacgcccggctgatttttgtattttttttaatagagacggggttttttcctgttggccaggctggtcttgaactcctgcctcaggtgatccgtcctcctcagcctcccaaagtgctgagccactgcgctcggccagcgtaaatttcttctaaagatacattttagctattaaaaaaatctattttagctatagctacagcttttagctatcagtagctatagataaaaataactatattctaatatggcttaaatggagatatgaccctctcattgatattttcctatgtgtaattatttttgaagcattgtgagttctgtgaaattttgctatttattgaactatgaaagcacttgattttcttaactcttgagtgccagaaatttgggaagaatattcctgaggattagacaaataatgataccttgtgtatatacatggtgttggaatgtctacatttcccttaagggcatcaattccataagttggtctacagataacttcacattagttgaccattgtttaacaatgctttaaagttacatttgcataagaatccaacttgatttttctaggaaaagttaaggaaaagaaccgaagaacctgatcgtgatgagcgtctaaaaaaggagaagcaagaaagagaagaaagagaaaaagaacgggagagagaaagggaagaaagagaaaggaaaagacgaagggaagaggaagaaagagaaaaagaaagggctcgtgacagagaaagaagaaagagaagtcgttcacgaagtagacactcaagccgaacatcagacagaagatgcagcaggtctcgggaccacaaaaggtcacgaagtagagaaagaaggcggagcaggtatatataaaacaccctaagactgtccagctcataatgggtgtgcaataacaataataactactagtattattccttggaatggtacttgggaagctcttaagcatctttaagtgataggatgggttgcgagagcggaatcagtgaataaaatagttccatcttcggggcaacttctgtgccatttcccacctgtctaggaaatttcacccaacctttttacaaagttagagtacctgatggtctcttaagtgcttgtctcactgattccgagaaataaaatatgaaatcagccatactgttttaattataattacaaattgaagaagagtcttaaagagcacaacgataaccatcttagcactattggagatgaatttagaaagattttcaataatttttagttcttaagatttctaatgtaaatatgttttagagggtaagttttgcctagtcttgttaattaatagcatctactccaaggcctttacttattgtaatactggctgaagttgccttttggttttaaattattaagaagtagagatcgacgaagaagcagaagccatgatcgatcagaaagaaaacacagatctcgaagtcgggatcgaagaagatcaaaaagccgggatcgaaagtcatataagcacaggagcaaaagtcgggacagagaacaagatagaaaatccaaggagaaaggttagtttatatgagaattcagttcattaagaaacttttcacaccctaatcgccccactcacttttctccagacacaggcaaagatccatttcatacatactccttttcactttgaggaatgccattcagtaggagacaggcattctttccccctctcctacttagatttgtgaaaatgacagtttatctggtgttttcttagatgttaaaaacatctttcagttgataaacctgaaggtttttaatgtagcttcttttaagtgttatattacctttcggggttattaggtgtaggatttattatattaccttggttattggctccttttttttttacacactgcagtgtttcataatacgtcttataaagtgagtgtacattgttgcattaatcttcatttgtagcattcatttaagttagtaattaacatctaagtacctagaagttgaattgcttacatgtgtcttacccacgttttcaatgggatcaacatgctctttcccctttactttttcttttttctttttctttttttttttttttggtgtggcatcccagtagctgatttactgtgctgttggcactattaatggactttttaatttgtgtggcatgttttcacaagaatattctcatctaacttagcctttattggaagataattctgttaaccaccagggtctcctttctgagtttcatgttcttctattttgtattttttatataaaagatataaaatatcttttattttgtattgaatgagctgttgtgctttgcatggttttaggaatgagagaaggggcctatttctgattttctcagctctccttgtttcatttcattctacctgtctccatgtttaatcaccagcataatatatgtgctactattaaggtttattatactagtcttttgtgtgttgtttgtttattatatcctttaatagaactgtcctggttttttgttttcgtttttcctctagactcagctagaactagcagcacaaaccatggacatattttttggtctctgcttttattttcttaaaataagcacacactctttttctgaaatatttaacatctattggcttttactgtaatgtgagaaagtgttgaaaacttttgtcttcctgccagatgtgctagtgtttgccattcaagttgagaacttgcttctgattcaaaaggcagttgctacaaagggttaactgatttaacattagatttaagaatgttttacctaatctttttgcaagactttctgtgtaatgtctttttgggttgagaggtcaactcttaagagccaggtatgactgtcaggtcaaattaataatatttgttttgagaaagtttttagttttacatttcctattgttagctttagttgctctattctgtgttatcatttgtgccacttaaaattgttgggttggttcttagggataaaagctagctagccttcataactacttgaagtcaaagttgagtagtaaatgacactggcctgactaaaaacaggcatatttgtgtaatttctggatagagcaaaaagatgtccagagttgcttacctttaatcctaaaattgtaatgatgatgacatgaaatttagtgaaacttttttttttttccagacagggtctcagtgtcacccaggctgagtgcagtggcacgatcacagctcactgcagcctctacctccccggcccaggtgatcctcccacctcagcctcctgggtggctgggactgtaggtgcatactaccatgcttggctaattttttttttttttttgggggggtagagatggggttttgccatgttgtccagtgtgatctcgatctcctgggttcaagcaatcctcctgcctcagtctcctaaagtgctggggttataggtgtaagccaccatgcctggcccctagtaaaacttttcgttaagcggaataagctgagttacgtttagattagcaacagacagggattttccatgtgagacttggtgcaaagagagaagttactaagaaaactgtatcaggcttgtctcccatgattgggtatgctatgatagagttaaacattggaatctcttttagaagtgatataatttattggcattttgaaaatgctatgtaaaaataaattaattaaaatcagtgtgcagatgagtgaatttaaaaaatgtaaaaaaaaaaatacagaaaagaaactaccatgtagccatctaggcactcttataaatgactgaagatctggactttgggaccaggtgtgagccacagtgggcatttattaatggcaaatgagaaaaagcaagtttattactccaggtgctatgatagaagcagtttatcttactccacaaatgaaaagtggtttctcacacaaagctgtcagcaaccagtgtaaggtgctctctttgtcaagagagtttccttttttcatccatagccctaaaatccaccacaaattgtggatgtccttaggactattaagatctaccatatttacatagggcagaagataagattattggactgactactagtcctctacgggacaacaagacgactcttcctcattgaagctacctgtgcaccggagaagcccataaggcacaaagggaggactttcccacaaggtcagttagagcccactgtcctggcacagttctcacaagtggacagacagacatgaagcaagtcttgcgcttaactacttggacattgctttgtgtattatgcaagtgttacggactaaatatgctcttttacataagatcttcagttctctgagtgggtgcccctcccataccatgttttgtttttcattaccatctctttcctagatatttggtgttacgtcttcataactgtgcagaaactatgtagagggttctgtttctcttaaaatgtctttttgtctaattaactactctgccagaccagctattcttagtaaggggaaaagtaatttttccagaaagtttctagttggctttaacattttctgtagaaattttttgttgggggaatacttggaactgaaaaggctagactatgcttgctctggtgtactacttttacctctagtctgaggtcttacccatccaaagaatagtagaggaaaaagttgtttacctttttcattcttcatttgcagctgagttgaattttaatttctctttttggaaaaacaactctcagatggcatatatattacttttcttagcaaagcacaaaagttcagttgcttagattgggatttaagatccattttctttgattaggcttatccttcttggatattcaaatatatataaaaataatgttttgcattgaaaaatatgtagttgtagtttttaaaacatgcctgttataaacattcaactttttttcaccttttggggtctccatttttacccttctaacttaataattgaacctcatgtgaacatagttttgtatgctgtcttttatacctttcccagtgctttttgatgttttttacccacaatgaaatttacttaaatattatattctgcaatgtgcttaatagcttctcaccaattgagagaatttacccactattttaccttttgcttccttgaattccccttcctgccttctctctcatatattacaaattttatccctttggtaaattcaccaaaccgttgcttgcagtctgtgggaaatgattgtctctcatctctcagttgtttcactttttttcaaaatcatgtctttattgtattttactttaaaatccatggtcaatgtcttcttttatggcagaaaagaggggatctgatgataaaaaaagtagtgtgaagtccggtagtcgagaaaagcagagtgaagacacaaacactgaatcgaaggaaagtgatactaagaatgaggtcaatgggaccagtgaagacattaaatctgaaggtgacactcagtccaattaaaactgatctgataagacctcagatcagacagaggtaagtgtattgtttctcactttgattagggctttttgttactgtttgacagtgcagcgtaagtatgcacagatgaagatggaactaagccgagtaagaagacatacaaaagcctcttctgaaggaaaagacagtgtagtcctgcaaaacattttgaggtacattgttttgtctcagctattttgtagcagactcgtgcccccattagtgtgcctctttggaaattatcgcccacatttgtaatatagtcgccattgaaaagttaattatcctttttttagggattttgatgtcatttcttttttttttttaataaaaaggttgaactgtttttttttttctttttggtattaagtccatcttgtgttggtacattggcagagacatatgctttaaaaacttaaatatttcggaggcacatgttggactactttgttttaattaaactgctagtatttctttgtcaaggatgtttctagttttttgctttattgccttgcattctaatgcagtttgttctgtaactcgagagccagtagcattggattgatggaagtgtagggtttatgaattattgcagctgactaccatacctcacacagcgttggtgttgtgagcggcccatgaaaagccaaattaaaaatcaaggattcagtcaaactaagcaggtactcatgccaggtactcctttctctacccacatccatgtttgaatgctattgcctgtgatctttacgcttaactgttgtgtatcttttttgttctttacaagaagtgcagaggggttttttgtgtattgcgtgaaaacttataaaacaaatgttaacagaatggaattttttttcaactgtatgtagggctgcagtggtggccagaattagatatctttaaagaattttaaatacaataaacacttcatattattcgccttgttacactcaatgcaattctcaagtctataagaggtatgtgcttaatatttcctactgtgtaggagaatttgcagtcagccataggtatgtaggaatagtcactcactggctgatacatttaaagcagcagtgtgaatagcaaggacagacaccttcaatttgtgaaatcaaagaactgatgcactatatagaacgaatttgggtttttaaagaaatattaaaagttaggtactgtaagtgttcttaaaacctgtaaacttcattctgtgggctagtggtgtgggacaaaatattcctaatgaaaggaagtaccaattagttgatttgttggtggcattccccttttgggaaagcaatgtaaggttatgtctgtgtatgtcattcacacttaggcaagcatacacaggcacatggctttaagaaccacactgatgccttgataattaaaaagaatacaagcattccatgtacacatgttaattagcagttagtgactgggccaacactttctcataaaaattggccttttacatgttgtctaattatcatttttccccaaattttgcgttgtaggactactgttcgaagatttttggaagaatactgagaacggcataaagtgaagatcgacatttaaaaaatgaggtgaaagaaagctatagtggcatagaaaaagtataaagctcagttagtttttttattattattattattaaaagttaattcaggactgatgtgacctaccagatttcagaacatgtgttaatagtatatatgccactgaaaacttaggtcctgtatcatacttttttctttaagactttttaagaaatattacttaaacatgtggcttgctcagtgtttaattgcaagttttcaatcttggactttgaaaacaggattaaacgttagtattcgtgtgaatcagactaagtgggatttcatttttacaactctgctctacttagcctttggatttagaagtaaaaataaagtatctctgactttctgttacaaagttgattgtctctgtcattgaaaagttttagtattaatctttttctaataaagttattgactctgaactagtcccctgttttaaatacaagagttacactattactagaggtgttggtgtacagttttatctgatttgttctgtttaagactaatttttatagactttctaatgttttaaataatggtgcttcaattttaggtggttatgaataaatttgaattttgcttttaatagcaaagatgtgcagtgaactagaatatatttttacatccctgagagattcatttagtagaaaattccaagtatcctgacaagcactctttagctggctagctatgggatgatgtagaaaagcattcaagagctagtttttgttaagtcctgtatcaagattaacccagctgtgtcagtttataaatgtatttgtgtatagggtgtgtagtatatatggcaagggttttttccccccacttaagtgattatttttgtgtcacatctaggaaaaccggcagcatgtttctatctatagccagcttcttcgactgtataaaagtattctctccagctacgtatatacacacatacatatatatcatagcaattccttgtggtttataacttgcaaatactgctatcagtttataggtaaagaaacagtgtgttaaatgacttatccagggagggtcctgtggcttcatgtttatggagttgctaggtctctgcctcatggtccagtgcctgttaagccactgtgttcattctaataggcataatgaattgttaaagaatttactaaaatctcttccaccaaactttgaaaaataatgaagccgcccccactttagaggctctgtatgaaaaaatgctgtggagacagagccctcctggctccctagctgatcctggagatgcagcaatagatgaatgggttatctctgaatttgtaagagataattcacatgaggattaagataaaatgggaagtaaaatctaacaaacacaaagatagctcccaggcactgctttgtgtagtttgacagcattgtggttgtagcagcaaaggacttaaagtgatagtttttaaaccatattctgtccctaagtaataaaaaatctaggaagttactaaaataccagatttgttctgctctgcctcatctagaatcaacgtctaactaacttaaatgaagtataataaatgagttcatatgaaaaggcttcctctatggacacttagatatattgtaactattgaagttacctgggatgtgggggtggtgggaggaggacctgcctccccaggacatctatgactaaggcctggctttagttatggagagagacgtagaagttgaattttacacccaaaattgatgtgactgaagaggaactgattgttgctaaccagctcacaagaatccagtattgagaccagttcactagaagaaacaaacatttctgccatgcagaccaaaaagttattagttggtgaatatgtattttctctttggaaggtctttaaggggagcaaaccagttttaatcaatcagattgcttggtaagtttggaatctgcaatcagttggtcttaaaaaaaaaaaaactttattttggaaatttaaagacatacacaaaagaggaacaatataattaacctctgttaactcatcaccaacaagactcatgaccacttttatacttcatgagtgattgtatttgtatccactgttttctattattttcgagcaagtctcagacacaccatttaatctgtaaataattcagcatgtatctctaaaagacaaagacctcttaaataacagttcattagtataaaacaaattgggtaaacttttgttggtcatcaaactatattagcactggtccaatagtttaattttcattgagcctttcaagaggaccgaccagtctgctgctcaagacatcctctcctctgga

SEQ ID NO: 1793 - DNA, 1466 bp, Homo sapiens
attctgtgggatgggacttcatgcaggattggttttcaagtttgatttcctgagggattttttagttgtttgtgaaagaaccccaggtctacttttgaaattttgtattataattgtaatgttgcccatggttaaaaaaaaaaagtgttcagtgatctatgtctcctactactcctatttctctgtttttcctctgcaggagcttgctgctgttaacagttattcttccaagttgttttctttgtggggagatgggaggtgggaggaaatataaacatatatgtatagatctttcaaaatatatgacggtatacccgtatgttctgagtcttgctgtttttacctggtaatatttagaaacatttattttgagataaaggagagcacttttaagttgaacctgtagttttaaaaagtacatttcaagtaagccaaagcagagaagtaaatgtatttttcattgttgtatcagaattttgaatttactattttaaaaattcaagagttttgtagctgatctatttcttcccctcagccatcccaaataggtcatttgtcaacagatttaagaatgtttagaaacaacaactttgggaaacgggaaacaatttggtataagtgggtgtgccataacctctctcgtagccattcattcccggatacataccctagagaaactcttacacatgcgtaccaggggatggatttaagcatttgtgtgtaataggaagaaaagaagaaaaaacccgggaagatcccaagtgtccaccaacagtgtgttggataaatactgtggtatattccaacagtggaattccacagaagtgaaactgaactgcagctgtgtatgtgaacatggacaaaactcaacaatagaaggatcaaaaaaagcaagtcacagaagaatacatcactatggttccatttcaatgaaagtcaaaaacaggctgtcaaatacatgataaaaggaaacgattaagacaaaatttaatgttagccgttttgatggagggagaggtgatcatgagggcacaggggtcttcagaagaactggtgagggtctgtttctgaagcctgtgggcatttccttttttaatctgtatgtttatgtgcttttgtatgtatgatatttcttaataaaatttaaaaagaagaatgggaaaaaagtcttggtgtaggtagttactaatatataagctgtagtgtatttcgtaaaattaaccatcagtcagtgacaaatttaaagatgctgtttcttgagtgcccaatttaaggttttattttgtttgagacagggtctctgtcttgtcacccaggctggagtgcagtggcacgagctcagctcactgcatctttcgcctcctgggttcaagccattctcgtgcctcagcctcccaagtagctgggattacagcttcgcaccaccacacctggctcatttttttgtatttttagtagagtgtttc

SEQ ID NO: 1794 - DNA, 3291 bp, Homo sapiens
tttttttttttttttttttttattaaatggtattgcttttgtttgcaggtctttttgtttttgttttgtttttgaggctgactgactgtcctagttgttgtgtgtttgtaatttttccacatcttattttgagcagctttgggtggtaaagttattgtttacaaattgaagcaactgattctagtggaacaaatgaaaaagaaacagtcaagcacacaatagtgcaaagaacgttcctttgtagatccgcaacttaaggattttgttcctcataaatggcatagttgaaagagcttatacactgcttacccagccaaatgctttgctttgaagtattgggttctgtgaaaatattgagcattgtacttaccttatctaggctgtgaaactgtcctacataccagagaatcataaaaacaaaaacctcactggcagcaagctgccgaataacaacagagtctagaggacatatttgtgggctgcacagatattttaggaatttcagaaattagaacaggagccaaaatgatttacattggcgttggcactgattcctttaaatggtctgggaaagggggttgggaagaggatggagctcaactggccagaagaggagcagctgcagtcctgatagcttctctagcctcggtcttttgagtgataagtagtcatgttgttttcatccagttggtttcttgtcattcccaagaagaatctcccaggccacatctttggggataactgacatactggattagccttttcaaaagaaaagtcatcctatttggttttatggggtgtgagttttgtgtgtacacacacagaaacatgtaaggtggtttgggtcatgtttttaaccacctggcaatacagtccactttctggtttcttttattgtgggaagtaaatggtcaagctgctcaggcagtgaaaagatgtggagaatgtccgttgtcattcttgccactgtattccatttgctaccgagatataacattaaggtggacacattttctaactgtattaattaaaagtcaatggatacagagagtggattttctccccaagtcccatccctgctgaagaccgcttggatgaactccccaacccactgtgcccctcccgcaacactaccagtagactttagaaccatagttaactaagtcttttacctctgagatacttaattctgggaaaattggtgacaattttcaacttctaaataggtaactcgactgcaaaataatcaaaactgataacaatgaaactgcggctcttaaacaaagccatgcatgccgtgcatttgtattgaaatgtctccatgatatgaagccaaatattcaatgtaacatacttaatatccaaaggtggaaacaaaagaatgtagagatccagtgttaagagttccatttgcttcaattaattatttaccttcctgtggaataatatatatatatatatttaatagaaccatagatagactagtagaatttagattataaatgtgtgagtgcagattatcctgctattgcacaagctagaggggggaaaaatctcaattccagctggcaagatgctagccaggacacatataagaaagttgcactagattgaatggtcacagaatcggaggacatggaagaaaaaggaaacttcggtggttctgcagcagacatgggctaggtcatatgtggtttctatgagttcgtgtctcaaaaaaaaaaggagggggggcatctgtccccggtggagctcacctatttggaatatggggcatttgttttttccactgcaatgatttcagtctggtttcatcatgttggaattcgatcacaccattttcaaacaatgttaacatagtccagcttttgtttttctcatctcttctgagaggagactcactgtttctgtctgaggaagctcataccctcggcaaaacatcaggacaaataaagagaaatgggggtacgcattcccaacagaagcagtgtgttatttgttttaaaactctgaacagagatcttggaaatctttcaaaaagaccattgaattcttcattggctgagaacgacgttttaaaatgtcttaaataaggctttgtttgcattgtttgagttcaaggggccttattattgaatggaattgcacaagcctttctttgtgcaatcaaaccattgttattggtagttctgtaaaggaaactgtggaatcgaattggcagtggagtcataaatctatttactgagtgtggcttccaagaaatgttgcaattcaaaatgcactaagtctgtgatttattggagatttggagattctaaataatatttttaaaaaacttccatgcaacttctggtttaatgtttggcaactccacatgataaaaaaataaaaacagcccaaccgagtttcggaattaagtattcttctagtaagtgattcaaacttgtaatatttgccacaggactgacttatttatttactagctagaagctcttaagttcacttgtttatcagggcatatacagaagggtttgttaaaactcgatgttaactttacaactttctgacctggtgcatgaattctcaagtactgtatttcactgtgttggtgtgtctgatggaaatttcgaggtggtcccacaaaaatattttatgtagtgtgccttcaaagagaaccatttatttctcttcacttatcgtcccacaaagtcacatttggtggtggtcagccaagtcgcatctggtctagttttactcttgtcccaattttaaagagaaatgggaatgagtttgccctggtgagacccataccattgcaatgattatcttgagcacttaaagtccagtgttggctgttagtgtatttgatattctgcctgtctcctcatggttgaaatatgtctgaagaatagcagcataatctcttggctgtttatacttttttaaactttcctgtgttgtaaatattgtatacttttggtgattccagctatgtaacctctatgctctgtaaggtgattatttgtatatagcaacatggcccagtgatattatatagtttcccaatggagaggttattgagtaacctttgcattagtttaaacactaccagaagaatgctgagccaactataaacactcaattttgtatgttttccaaattgtacttattactgcttttgatactgtattacgtgccaatagtttcccaatcacatagcaggcaagagatattttgtactttttgatccactgtaatatttaataaaaaatgttactatctgtttccttt

SEQ ID NO: 1795 - DNA, 3291 bp, Homo sapiens; identical to SEQ ID NO: 1794

SEQ ID NO: 1796 - DNA, 92 bp, Homo sapiens
ctcactgcaacctccgcctcccaggttcaagcgattctcctgcctcagcctcctgagtagctgggattacaggtgcgtgccaccacgcccag

SEQ ID NO: 1797 - DNA, 7852 bp, Homo sapiens
agattaatcctaccatatgaaagatttattaaaggagaagaagataagcccctgcctccaatcaaacctcggaaacaggagaacagttcacaggaaaatgagaacaaaacaaaagtatctggaaccaaacgcatcaaacatgaaatacctaaaagcaagaaagaaaaagaaaatgccccaaagccccaggatgcagcagaggtgagttgctttgctccatagaaatacctctggaagacatgtgctgcctcgaggtccttctggagccctgaatccacagctgtgtccctgcacagttggatggcttgatgaagaaaccaagaaatctaagcttcacagttccccacatagttccccagttcctgaaagcctttcagcttgctcatgagatgaaatccaatgcctagtattgaatgagatagcccaggaatagaatctagaaagatacaaacatcctgtagaaaactgatagcaaatgctcaggcttcaagagaaaagggtccagagccacactaacatcaaagaattttactgtgaaaacatggcttcttggccgctccacagcccgtctatctgaggtgctggtgcgactttaaaacatattttggggctggacatggtggctcgcgcctgtaatcctagcactctgggaggccaaggcaggtggattgcttgagcccaggaattcaagaagagcgtgggcaacatggtgagacccagtctctacaaacaaagctcacacctgtaatcccagcactttgggaggctgaggcgggcggatcacaaggtcaggagatggagaccatcctggctaacacggtgaaaccccgtctctactaaaaatacaaaaaattagccaggtgtggtggtgggcgcctgtagtcccggctacttgggaggccaaggcaggagaatggcatgaacctgggaggcagagcttgcagtgagctgagatcacgacagcctgggtgacagagcaagactccatctcaaaaaaaaaaaaaaaaaaaaaatatcaggcatggtggtgccccgctgtggtcccagctactcaagaggctgaggtgggaggataaccagagccctgggaggtaaagtctgcagtgagctgtgattataccactgcactcctgcctgggtgacagagtgaagccgtgtctcaaaaaaaatgctttggaggtccaggaaaggggaccttggaactgtggtgctgtatcctgcaagactctcctgaaaactttagagaagtgtttgtctcccataattgatttctgtgcaacagccatgggttgagaccaatttaagaaaatcttaagtgtggccgggcgcggtggctcacgcctgtaatcccagcattttgggaggccgaggcggtggatcacgaggtcaggagatcgagagcatcctggttaatacggtaaaaccccgtctttactaaaaatacaaaaaattagccaggcgtggtggtgggcacctgtagtcccagctactcaggaggctgaggcaggagaatggcgtgaacccaggaggcggagcttgcagtgagccgagatcaggcccctgcactccagcctgggtgacagagagagactctatctcaaaaaaaaaaaaaaaaaaaaggaaaaaagatcttaagtgcatattatttataggggaattttgaaatggttcctatgaaaccattattatttttcatattaacaggtagtttctgcactttttaagcccccaacagccttttggtagaagccattacccccagcatgtagccagtcatgtaggctgatctgggctccatttcaacatgaataataaaaaacgctgctgcccattaaaaaaaaaaaaaaactgagcagccacatttggagacagcatgttctaggattcaaccccagagggaattttgatgctgatattaaataccccctaaaaaatcaggtttataatgaacacataagaggctccataattaaacactggtttaaattgcacatgtacaacacgcaccaacctcccatctagacatcaacttacccagctgactcttacataagaaaatagtattgataccaagattagaaatttgtgggttttttgtttttattaggtttcataattattttaagctctagtaactaaaaagggggaggaggaagaagatgatgcagattttttttttttttgagacagagtctctctctgtctcccaggctagagtgcagtggtgcaatctcggttcattgcaacctccgcctcccaggttcaagcaattctcctgcctcagcctcccgagtagctaggactacaggcatgcaccaccacacccggttaatatttttgtatctttagtagagacagggtttcaccatgttggtcaggctggtcttgaactcctgacctcaaatgatcctcctgccttggcctcccaacgtgctgagattacaggtgtgagccaccgtccctggccagatgatgcagatttctcaacatctgcaagcttgcaacataaatggccaaaagcaaggaaattccaagtgcatgcttacattccatttttccttgatacttttggcctggtgatttattatagggtttcagatgagtgtgttctattagctgccatatgtacacaaaacaccaggggacaaactgaggaccaaggggacagctgaccgttgaatatctccaatttggggattaagtttgaaatggttggtttgtgaatggtaggaggaatctttagcctatgcactgagcctgtcagcttggatgatgaccatgcccaagagtggagccttactccctggagtccatagaaaccctgaaagctgttaggctttgtgtttcctgtaggctgcaactgttcccttcagggagctgtaagtgtctcaggttttgaaagttgtcatgatgaggttatctaaacctcatggaatcttccaccctctccaaggttgaccttataatacgaatcacttctcacctccaacatagaaccatgttattagccaggtgtattttttctcattaactctatttggggtttttggtttggattttattgttttcatcgcttttagtttttggtgttttcaatatgaagcggtgaactcaatggagatacaaagggtgagaaattccctctagttgaatccactatattcaagtaatgggattgcaagttgcatggtgggaagctaacatttaacatactaagcagatcataaaatgtcttactagaaaaaaagtcctttacttttttctgcctagctttcaaagacttcctaaacctgttttacaacccgaagcatgggactctgatataactgcagttctacatcatagaaacttcaatgagactgagtatccctcattgccctgcgtcaaactatagccccataagaaactaacaattagatgcaatttgcctttttcccttgccatactcatttgtctttatttttgtgtcatgtataagctcaagagaccaatgtgatgattattaatgtagaagaagtaatgatatttgtactggaaaaggcagctactagtacaaaaaataaaaagaaataatgatgataagcaaagtctcttaggtataacatgtccctaaaattcagggttttttttttaaagggatttaaggaaaaatacctgtgaaataggtgtgatttcttaaaacttttgttcccacgtattcctaaaccagcatcctcaatcttacccaaagatgctaattggcagacccacccttccttccttcctgcctgcctgccttccttccttcctttcttccttccttccttccctccctccttccttctttttcttttttttttttttttttgtgaaagttacactcttgttgcccaagctatagtgcaatggcatgatctcggctcaccgcatcctccacctctggggttcaagcgattctcctgcctcagcctcctgagtagctgggattacaggcacccaccaccacacctggctaatttttgtttttttactagagatgaggttttgccatgttgaccaggctggtcttgaactcctgacctcaggtgatctgcctgcctcggcctccctaagtgctgagattacaggcacatcttttcttaacagagaagaacaaagttcaagggatgagatggaaaaaggaggggaagaataccagctcagtacaactgttttgtgactgctctgctaagacatgtcagggcagaatgacagcagttttgaaagggcttgtcagtcagctgggtcatagatggaaagttaaaatgacctcctaaggtcaaagtttatatggctgcataatgcagtaaatgagtcgaattggtacccacaacttctgtcagtagggtcacataaggagtgtgtctgtctcattgactataatttatttcattcaacagcaaagctatatttgcggtggcactgactgtctgaattttgacaacttcattttgggctttaatagaaatgtagtttgctgcaacctagaaggacttagtctcctctgtccctctggtagacaggctgccaagaaatcttcatactttgtcaatattttagcattatctgcatatcatctggccctgagtagaaattattaacacttatgcattgctaatcttcagtgcatcatattgaatacattgggaagggatttgccctgttaaggaaagcagggagttgcaataggtttgttgtttgtcgttaacatggggttggttggatttttgaaagagaaatgctttaaaaaaatctttctcaggagtatcataaaacacaacatgtaatttaaaacccatttggataattgactgatttgacaagaagacaaccttagaattaaactatatattagaatcaaggagtgatatgattgtataccatcagtacataatactttgctattttgataggtatctcataagggactgaagcgaatatgcatatttcccctaatgtttctgtaatttagatttctttgtttagagccatgattggggagtaataaagctttacagaaacttcacgagctgattgacaagcctgttttcaagtaaaactgctgtgtggaatattttatttcatagcaaaacatgtctgtgtatttggttttcttctgactgtcttttgaaatatgttaccaggtttcatcagagcaagaaaaagaacaagagactttaataagccagaaaagcatccctgagcctctcccagcagcagacatgaagaaaaaaatagaagggtatcaggaattttcagcgaagcccctggcatccagagtagacccagagaaggacaacgaaacagaccaaggttccaacagtgagaaggtggcagaggaggcgggagagaaggggcccacacctccactcccaagtgctcctctggccccagaaaaagattcagccttggtccctggggccagcaaacagccactcacctctcctagtgccctggtggactcaaaacaagaatccaaactgtgctgttttacagagagccctgaaagtgaaccccaagaagcatccttccccagcttccccaccacacagccaccgctggcaaaccagaatgagacggaggatgacaaactgcccgccatggcagattacattgccaactgcaccgtgaaggtggaccagctgggcagtgacgacatccacaatgcgctcaagcagaccccaaaggtccttgtggtccagtcgtttgacatgttcaaagacaaagacctgactgggcccatgaacgagaaccatggacttaattacacgcccctgctctactctaggggcaacccaggcatcatgtccccactggccaagaaaaagcttttgtcccaagtgagtggggccagcctctccagcagctacccttatggctccccaccccctttgatcagcaaaaagaaactgattgctagggatgacttgtgttccagtttgtcccagacccaccatggccaaagcactgaccatatggcggtcagccggccatcagtgattcagcacgtccagagtttcagaagcaagccctcggaagagagaaagaccatcaatgacatctttaagcatgagaaactgagtcgatcagatccccaccgctgcagcttctccaagcatcaccttaacccccttgctgactcctacgtcctgaagcaagaaattcaggagggcaaggataaactcttagagaaaagggccctcccccattcccacatgcctagcttcctggctgacttctactcgtcccctcatctccatagcctctacagacacaccgagcaccatcttcataatgaacagacatccaaatacccttccagggacatgtacagggaatcggaaaacagttcttttccttcccacagacaccaagaaaagctccatgtaaattatctcacgtccctgcacctgcaagacaaaaagtcggcggcagcagaagcccctacggatgatcagcctacagatctgagccttcccaagaacccgcacaaacctaccggcaaggtcctgggcctggctcattccaccacagggccccaggagagcaaaggcatctcccagttccaggtcttaggcagccagagtcgagactgtcaccccaaagcctgtcgggtatcacccatgaccatgtcaggccctaaaaaataccctgaatcgctttcaagatcaggaaaacctcaccatgtgagactggagaatttcaggaagatggaaggcatggtccacccaatcctgcaccggaaaatgagcccgcagaacattggggcggcgcggccgatcaagcgcagcctggaggatttggaccttgtgattgcagggaaaaaggcccgggcagtgtctcccttagacccatccaaggaggtctctgggaaggagaaggcctctgagcaggagagtgaaggcagcaaagcagcgcacggtgggcattccgggggcggatcagaaggccacaagcttcccctctcctcccctatcttcccaggtctgtattccgggagcctgtgtaactcgggcctcaactccaggctcccggctgggtattctcattctctgcagtacttgaaaaaccagactgtgctttctccactcatgcagcccctggctttccactcgcttgtgatgcaaagaggaatttttacatcaccgacaaattctcagcagctgtacagacacttggctgcggctacacctgtaggaagttcatatggggaccttttgcataacagcatttaccctttagctgctataaatcctcaagctgcctttccatcttcccagctgtcatccgtgcaccccagtacaaaactgtaggctcagctctgcccagcagtccaaagcggcatggcccaccaagcttcactccttacccaggaggtgctgggcttatagagttagaagtcagtttttcttctaatctgagggtaagatcagtcccagcgtagggggccagaagggaggtgaacatgcctgatttttgtgggacaactctagcccacaaactgactggctggtgagtcttgactcccttccaacacagatgcccaggcacctccagatcattcacttcgcacgtgggccttgtgaagggatttgtgaatatccaggaagaacttagaggaccccatctgagttcggatggtcaggaaacaatctgggcaaaaaagaggcaggcatttcaaaggaaggggcaaggaagactggcaaacagatggcaagggatgcccctctttttcataaaactctccaaggttcaatcaatgcaatgtatagtgaaacttcaatagatctttcattttgacactattaaacaatccagagaagtaaacactgtt

SEQ ID NO: 1798 - DNA, 7851 bp, Homo sapiens
agattaatcctaccatatgaaagatttattaaaggagaagaagataagcccctgcctccaatcaaacctcggaaacaggagaacagttcacaggaaaatgagaacaaaacaaaagtatctggaaccaaacgcatcaaacatgaaatacctaaaagcaagaaagaaaaagaaaatgccccaaagccccaggatgcagcagaggtgagttgctttgctccatagaaatacctctggaagacatgtgctgcctcgaggtccttctggagccctgaatccacagctgtgtccctgcacagttggatggcttgatgaagaaaccaagaaatctaagcttcacagttccccacatagttccccagttcctgaaagcctttcagcttgctcatgagatgaaatccaatgcctagtattgaatgagatagcccaggaatagaatctagaaagatacaaacatcctgtagaaaactgatagcaaatgctcaggcttcaagagaaaagggtccagagccacactaacatcaaagaattttactgtgaaaacatggcttcttggccgctccacagcccgtctatctgaggtgctggtgcgactttaaaacatattttggggctggacatggtggctcgcgcctgtaatcctagcactctgggaggccaaggcaggtggattgcttgagcccaggaattcaagaagagcgtgggcaacatggtgagacccagtctctacaaacaaagctcacacctgtaatcccagcactttgggaggctgaggcgggcggatcacaaggtcaggagatggagaccatcctggctaacacggtgaaaccccgtctctactaaaaatacaaaaaattagccaggtgtggtggtgggcgcctgtagtcccggctacttgggaggccaaggcaggagaatggcatgaacctgggaggcagagcttgcagtgagctgagatcacgacagcctgggtgacagagcaagactccatctcaaaaaaaaaaaaaaaaaaaaaatatcaggcatggtggtgccccgctgtggtcccagctactcaagaggctgaggtgggaggataaccagagccctgggaggtaaagtctgcagtgagctgtgattataccactgcactcctgcctgggtgacagagtgaagccgtgtctcaaaaaaaatgctttggaggtccaggaaaggggaccttggaactgtggtgctgtatcctgcaagactctcctgaaaactttagagaagtgtttgtctcccataattgatttctgtgcaacagccatgggttgagaccaatttaagaaaatcttaagtgtggccgggcgcggtggctcacgcctgtaatcccagcattttgggaggccgaggcggtggatcacgaggtcaggagatcgagagcatcctggctaatacggtaaaaccccgtctctactaaaaatacaaaaaattagccaggcgtggtggtgggcacctgtagtcccagctactcaggaggctgaggcaggagaatggcgtgaacccaggaggcggagcttgcagtgagccgagatcaggccactgcactccagcctgggtgacagagagagactctatctcaaaaaaaaaaaaaaaaaaaaggaaaaaagatcttaagtgcatattatttataggggaattttgaaatggttcctatgaaaccattattatttttcatattaacaggtagtttctgcactttttaagcccccaacagccttttggtagaagccattacccccagcatgtagccagtcatgtaggctgatctgggctccatttcaacatgaataataaaaaacgctgctgcccattaaaaaaaaaaaaaaactgagcagccacatttggagacagcatgttctaggattcaaccccagagggaattttgatgctgatattaaataccccctaaaaaatcaggtttataatgaacacataagaggctccataattaaacactggtttaaattgcacatgtacaacacgcaccaacctcccatctagacatcaacttacccagctgactcttacataagaaaatagtattgataccaagattagaaatttgtgggttttttgtttttattaggtttcataattattttaagctctagtaactaaaaagggggaggaggaagaagatgatgcagattttttttttttttgagacagagtctctctctgtctcccaggctagagtgcagtggtgcaatctcggttcattgcaacctccgcctcccaggttcaagcaattctcctgcctcagcctcccgagtagctaggactacaggcatgcaccaccacacccggttaatatttttgtatctttagtagagacagggtttcaccatgttggtcaggctggtcttgaactcctgacctcaaatgatcctcctgccttggcctcccaacgtgctgagattacaggtgtgagccaccgtccctggccagatgatgcagatttctcaacatctgcaagcttgcaacataaatggccaaaagcaaggaaattccaagtgcatgcttacattccatttttccttgatacttttggcctggtgatttattatagggtttcagatgagtgtgttctattagctgccatatgtacacaaaacaccaggggacaaactgaggaccaaggggacagctgaccgttgaatatctccaatttggggattaagtttgaaatggttggtttgtgaatggtaggaggaatctttagcctatgcactgagcctgtcagcttggatgatgaccatgcccaagagtggagccttactccctggagtccatagaaaccctgaaagctgttaggctttgtgtttcctgtaggctgcaactgttcccttcagggagctgtaagtgtctcaggttttgaaagttgtcatgatgaggttatctaaacctcatggaatcttccaccctctccaaggttgaccttataatacgaatcacttctcacctccaacatagaaccatgttattagccaggtgtattttttctcattaactctatttggggtttttggtttggattttattgttttcatcgcttttagtttttggtgttttcaatatgaagcggtgaactcaatggagatacaaagggtgagaaattccctctagttgaatccactatattcaagtaatgggattgcaagttgcatggtgggaagctaacatttaacatactaagcagatcataaaatgtcttactagaaaaaaagtcctttacttttttctgcctagctttcaaagacttcctaaacctgttttacaacccgaagcatgggactctgatataactgcagttctacatcatagaaacttcaatgagactgagtatccctcattgccctgcgtcaaactatagccccataagaaactaacaattagatgcaatttgcctttttcccttgccatactcatttgtctttatttttgtgtcatgtataagctcaagagaccaatgtgatgattattaatgtagaagaagtaatgatatttgtactggaaaaggcagctactagtacaaaaaataaaaagaaataatgatgataagcaaagtctcttaggtataacatgtccctaaaattcagggttttttttttaaagggatttaaggaaaaatacctgtgaaataggtgtgatttcttaaaacttttgttcccacgtattcctaaaccagcatcctcaatcttacccaaagatgctaattggcagacccacccttccttccttcctgcctgcctgccttccttccttcctttcttccttccttccttccctccctccttccttctttttcttttttttttttttttttgtgaaagttacactcttgttgcccaagctatagtgcaatggcatgatctcggctcaccgcatcctccacctctggggttcaagcgattctcctgcctcagcctcctgagtagctgggattacaggcacccaccaccacacctggctaatttttgtttttttactagagatgaggttttgccatgttgaccaggctggtcttgaactcctgacctcaggtgatctgcctgcctcggcctccctaagtgctgagattacaggcacatcttttcttaacagagaagaacaaagttcaagggatgagatggaaaaaggaggggaagaataccagctcagtacaactgttttgtgactgctctgctaagacatgtcagggcagaatgacagcagttttgaaagggcttgtcagtcagctgggtcatagatggaaagttaaaatgacctcctaaggtcaaagtttatatggctgcataatgcagtaaatgagtcgaattggtacccacaacttctgtcagtagggtcacataaggagtgtgtctgtctcattgactataatttatttcattcaacagcaaagctatatttgcggtggcactgactgtctgaattttgacaacttcattttgggctttaatagaaatgtagtttgctgcaacctagaaggacttagtctcctctgtccctctggtagacaggctgccaagaaatcttcatactttgtcaatattttagcattatctgcatatcatctggccctgagtagaaattattaacacttatgcattgctaatcttcagtgcatcatattgaatacattgggaagggatttgccctgttaaggaaagcagggagttgcaataggtttgttgtttgtcgttaacatggggttggttggatttttgaaagagaaatgctttaaaaaaatctttctcaggagtatcataaaacacaacatgtaatttaaaacccatttggataattgactgatttgacaagaagacaaccttagaattaaactatatattagaatcaaggagtgatatgattgtataccatcagtacataatactttgctattttgataggtatctcataagggactgaagcgaatatgcatatttcccctaatgtttctgtaatttagatttctttgtttagagccatgattggggagtaataaagctttacagaaacttcacgagctgattgacaagcctgttttcaagtaaaactgctgtgtggaatattttatttcatagcaaaacatgtctgtgtatttggttttcttctgactgtcttttgaaatatgttaccaggtttcatcagagcaagaaaaagaacaagagactttaataagccagaaaagcatccctgagcctctcccagcagcagacatgaagaaaaaaatagaagggtatcaggaattttcagcgaagcccctggcatccagagtagacccagagaaggacaacgaaacagaccaaggttccaacagtgagaaggtggcagaggaggcgggagagaaggggcccacacctccactcccaagtgctcctctggccccagaaaaagattcagccttggtccctggggccagcaaacagccactcacctctcctagtgccctggtggactcaaaacaagaatccaaactgtgctgttttacagagagccctgaaagtgaaccccaagaagcatccttccccagcttccccaccacacagccaccgctggcaaaccagaatgagacggaggatgacaaactgcccgccatggcagattacattgccaactgcaccgtgaaggtggaccagctgggcagtgacgacatccacaatgcgctcaagcagaccccaaaggtccttgtggtccagtcgtttgacatgttcaaagacaaagacctgactgggcccatgaacgagaaccatggacttaattacacgcccctgctctactctaggggcaacccaggcatcatgtccccactggccaagaaaaagcttttgtcccaagtgagtggggccagcctctccagcagctacccttatggctccccaccccctttgatcagcaaaaagaaactgattgctagggatgacttgtgttccagtttgtcccagacccaccatggccaaagcactgaccatatggcggtcagccggccatcagtgattcagcacgtccagagtttcagaagcaagccctcggaagagagaaagaccatcaatgacatctttaagcatgagaaactgagtcgatcagatccccaccgctgcagcttctccaagcatcaccttaacccccttgctgactcctacgtcctgaagcaagaaattcaggagggcaaggataaactcttagagaaaagggccctcccccattcccacatgcctagcttcctggctgacttctactcgtcccctcatctccatagcctctacagacacaccgagcaccatcttcataatgaacagacatccaaatacccttccagggacatgtacagggaatcggaaaacagttcttttccttcccacagacaccaagaaaagctccatgtaaattatctcacgtccctgcacctgcaagacaaaaagtcggcggcagcagaagcccctacggatgatcagcctacagatctgagccttcccaagaacccgcacaaacctaccggcaaggtcctgggcctggctcattccaccacagggccccaggagagcaaaggcatctcccagttccaggtcttaggcagccagagtcgagactgtcaccccaaagcctgtcgggtatcacccatgaccatgtcaggccctaaaaaataccctgaatcgctttcaagatcaggaaaacctcaccatgtgagactggagaatttcaggaagatggaaggcatggtccacccaatcctgcaccggaaaatgagcccgcagaacattggggcggcgcggccgatcaagcgcagcctggaggatttggaccttgtgattgcagggaaaaaggcccgggcagtgtctcccttagacccatccaaggaggtctctgggaaggagaaggcctctgagcaggagagtgaaggcagcaaagcagcgcacggtgggcattccgggggcggatcagaaggccacaagcttcccctctcctcccctatcttcccaggtctgtattccgggagcctgtgtaactcgggcctcaactccaggctcccggctgggtattctcattctctgcagtacttgaaaaaccagactgtgctttctccactcatgcagcccctggctttccactcgcttgtgatgcaaagaggaatttttacatcaccgacaaattctcagcagctgtacagacacttggctgcggctacacctgtaggaagttcatatggggaccttttgcataacagcatttaccctttagctgctataaatcctcaagctgcctttccatcttcccagctgtcatccgtgcaccccagtacaaaactgtaggctcagctctgcccagcagtccaaagcggcatggccaacagagcttcactccttacccaggagtgctggcttatagagttagaagtcagtatttcttctaatctgaggctatgatcagtcccagctgtaggggcccagaggggaggtgaacatgcctgatttttgtgggacaactctagcccacaaactgactggctggtgagtcttgactcccttccaacacagatgcccaggcacctccagatcattcacttcgcacgtgggccttgtgaagggatttgtgaatatccaggaagaacttagaggaccccatctgagttcggatggtcaggaaacaatctgggcaaaaaagaggcaggcatttcaaaggaaggggcaaggaagactggcaaacagatggcaagggatgcccctctttttcataaaactctccaaggttcaatcaatgcaatgtatagtgaaacttcaatagatctttcattttgacactattaaacaatccagagaagtaaacactgtt

SEQ ID NO: 1799 - DNA, 2853 bp, Homo sapiens
agtctgtgtcttttaacgggggcatttagcctgtttacatttaaggttaatattgttatgtgtgagtttgatcctgtcattatgatgctagctggttattttgcccgttagttgatgcagattcttcataatgtcaatggcctttacaatttggtatgtttttgcagtggctggtactgctttttcctttttgtatttagtgcttccttcagaagatcttgtaaggcaggactggtggtgacaaaatctttcagcatttgcttttctgtgaaggattttatttctccttcacttatgaagcttagtttggctggctctgaaattctgggttgaaaattcttttctttaagaatgttgtgccaggcaccgtggctcatgtgtgtaatcccagcactttgggaggctgaggctggcagatcacctgaggtcaggagttcaagaccagcctgaccaacatgggaaaactccatctctactaaaaatacaaaattagccagctgtggtggcacatgcctgtaatcccaactacttgggaggctgaggcaggagaatcgcttgaacccaggaggtcaggttgcggtgagccgagatcttgccatcatactccagcctgggcaacaagagtgaaactccatctcacacaaaaaaaagaatgttgaatattggcccgcactctcttctggcttgtagtgtttccgcagagaaatccactgttagtctgatgggcttccctttgtggataacccgacctttctctctggctgcccttaacgtttttttcattcctttcaaccttggtgaatctgatgattacgtgtcttggggctgctcttctcgagaagtatctttgtggtggtctctgtctttcctgaacttgaatgttggtctgtcttgctaggttggggaagttctcctggataatatcctgaagagtgttttccaacttggttccattctccccatcattttcaggtacaccagtcaaacataggtttggtcttctcacatagtcccatatttcttggaggctttgttcattccttttcattcatttttctctaatcttgtcttcatgctttatttcattaagttgatcttcaatctctgatatccttttttccacttgatcgatttggctattgatacttgtgtatgcttcacaaagttcttgtgctgtgtttttcagctccatcaggtcattgatgattttctctagactggttattctagttagcaattcttctaaccttctttcaaggttcttagtttccttgcagtgggttagaatgtgctcctttagctcggaggagttacccaccttccgaagcctacttctgtcaattcgtcaaactcattttccatccagttttgtttccttgctggcgaggagttatgatcccttggaggagaagaggtgttctggtttttggaattttcagccttcttgtgctggtttttcctcatctccctggatttatctgcctttggtctttgatgttggtgacctttggatggggtttttgtgtggacatcgtttttgttgatgttgatgctattcctttctgttttttagtttttctcctaacaggcaggcttctctcctgcaggcctgctggagtttgctggaggtccactccagaccctgtttgcctgagtatcactagcagacactgcagaacagcaaagattgctgcctgctccttcctctggaagtttcgtcccagaggggcacccgccagatgctagtggagctctcctgtatgaggtgtctgttgacccctgctgggaggtgtctcccagtcaggaggcacaggggtcagggacccacttgaggaggcagtctgtcccttagcagagtttgagtgctgtgctgggagattcgctgctctcttcagagctggcaggcaggaacatttacgtctgctgaagctgcacccacagccgcctcttccgccaggtcctctgtcccagagaggtgggagttttatctgttagcccctgactggggctgctgcctttctttcagagatgccctgtccagagaggaggaatctagagaggcagtctggctatggcagctttgcagagctgtggtgggctctgcccaattcgaacttcccagaagctttgtttatactgtgaggggaaaaccacctactcaagcctcagtaatggtggacgcttctccccacaccaagcttgagagtcccaggtcgacttcagactgctgtgctggcagcaagaatttcaagccagtggattttagcttgctgggctctgtggcggtgggatccactgatccacttggctccctggcttcagttccctttccaggagagtgaacagttctgtcgctggccttccaggtgtcactggggtatggaaaaaaaaaaaaaaaaaaaaaaaaccttctgcagctagcttggtgtctgcctaaatggctgccctgttttgcgcttgaaacccagggccctggtagtgtcagcactcgagggaatctcctggtctgtgggttgtaaagaccatgggaaaagcatagtatctgggttggaatgcaccattcctcattgcacagtccctcatggcttccctttggtgggggaggttgttttctcaccccttgagcttaccgtgtgaggtgatgcaccccccctgctttggctcgtgctctgtgggctgcacccactgtctaacctgtaccaaagagatgagccaggtaccttagttggaaatgcagaaatcacccactttctgcattgatctcactgggagctgcagacctgagctgttcctgttaggccatcttgccagccactcatattttacttttaagtgattaggttgtttgggaga

SEQ ID NO: 1800 - DNA, 2853 bp, Homo sapiens; identical to SEQ ID NO: 1799

SEQ ID NO: 1801 - DNA, 421 bp, Homo sapiens
tgaggagtgttttacttccaattctgtggtcaattttagaataagtgtgatgtggtgctgagaagaatgtatattctgttgatttggggtggagagttctgtagatgtctattaggtctgctttgtccagagctgagttcaagtcctgaatatccttgttaattttctgtctcgttgatctgtctaatattgacagtggggtgttaaagtctcctactattaattgggtgggagtctaagtctctttgtaggtctctaagaacttgcttatgaattgggtgcttctgtatagggtgcctatatatttagggtagttagctcttcttgttgcattgaaccttttaccattatgtaatgcccttctttgtcttttttgatcttggttggtttaaagtctgttttatcagaggctaggattgca

SEQ ID NO: 1802 - DNA, 340 bp, Homo sapiens
aatttcttgtgtatatgcatcttttacatataaaggctgttttaaaaatgagttgctgctttatagtttcttctttagaaacatataagattaaagataaaagaaatagaatagggaaatagcctagctatagaaacagcacttttaaatttcatatgtacagtgatttattatttgcaaatcatctactttttaaaagtatgatactttattatttgcaaattatttaatttttaaaagtgatttttgtgggaggtcagagttggatggagaagggtcattttcatttttgattagaggattcttgtaatgacctgatgaaaactgctctgagggcatc

SEQ ID NO: 1803 - DNA, 340 bp, Homo sapiens; identical to SEQ ID NO: 1802

SEQ ID NO: 1804 - DNA, 421 bp, Homo sapiens; identical to SEQ ID NO: 1801

SEQ ID NO: 1805 - DNA, 126 bp, Homo sapiens
  misc_feature (9)..(9): n equals a,t,g, or c
  misc_feature (17)..(17): n equals a,t,g, or c
  misc_feature (19)..(20): n equals a,t,g, or c
  misc_feature (32)..(32): n equals a,t,g, or c
  misc_feature (107)..(107): n equals a,t,g, or c
  misc_feature (113)..(113): n equals a,t,g, or c
  misc_feature (117)..(118): n equals a,t,g, or c
ttttttttntttttttntnntttttttttttnttttttttttttttttttttttttttttttttttttttttttttttttttttttttttttttttttttttttttntttttntttnntttttggc

SEQ ID NO: 1806 - DNA, 2149 bp, Homo sapiens
cagggatcagtctacatcctatttgctggagcagacccgccctgagtctaattgacacaccaggtgggtttatgggcttctccttcctcccaagcatcccacagccgcgttgcctattgtctttgtggcaagtcttgcccggcagcctagcttcagagcaatgtaagtggttgctgttatacccttctacccaccatgtgctggaaagaggagcatcatgactaaaaggcatgactcatgttctaatccatggcactactgatcctacttttctgcattttaaagtacaaacagctggatattgctgaagatggctcagggggtcaaggacaaatttcacaaatgtgacctcattctccaggctgcctgtttatcctggaggttgatcttggacttgggaccatttaaggttgcctatcttcaaagtgctcagcttggctttttaattctatactcctaaatctttgacagctgtgcatcaacaagctttcaaggtaactgaagcctagggcagctttctgccctctgttactggtgaatgtttttgcctgttggaaggacgttgcagctacaggcagactcccaccatccaccaacggccttattgtcaatccatagtcgtgtgctgactgcaaagtggcctgagttttttgcatatcttgtgagatcactatgggaacgcagtcattataatacagcagttcctgtcttgaggacttttgatagttttatttcttacagtttcatttcctattgatacaaaagagactcttggtaaccaaaaataaatgtaaccagaaatgtcggattctttgtttcatatatgaacatgattttgtaatgtaaattgaataagcccagatctattatgcaactatatactctcgtaacaagtgagtcacagaagcctccgtcaacactgacatattgatgaccttaagaagttagtgattacctatgatgtacaacaaacaaggctggtagctgccagcagaaactaggcataactacttctagtaagtactactactagttctaaaatttaaattaaatcagctcacaccttattttgtgctgctaccactaaaatccaagccaccatgacattatcactaacctggactactaactcatctttccgctttcactctgaccccctccattcattttccctggtgaagctagtgtcatcttataagtaaatcagatcatgtcattcatctcacaactcatctgctttccatctcaccgcaggatagaatccaaactcatcaccatggtctgtgagaccccctgtgatctggcctgcctgactctccgatctcatggcattaccactcccttccctcttgtgatgatctgtccgcaacgactttgctgtttctcatgcctggcccactatgtgcagacatgcaggttgtacaatgcataactccaagagaggcattcagtaggctgcagggtgaatgatgcccttggaagtatgtagtgtggtgaccctggtcacacgcacagctctttcctaccacaaagccttggcacttgctggcctttctgcctggacatccatctgaagattttttgcacagctggctccttcttgtcattcccttgacaaatattccaccaaacactactccataccagggaggctccataccaggcaggaccagctatatactttgcaggtcccagtgcaaaatgaaaaccagggccccttgttcaaaaagtattaagaatttcaagacggtgacagcagaacattaaactaagcatggggcccttctcagtgcggggccctgtgggacaacataggtcacacctccatcaagatggtaagggtttcacatgtattcatgaactcaattgtattttaaagtttagtagaaattgcacaattaataactggttagtgtatatttacctctgcctttggaagttaaagtttttttttttttgaactaaaaattccttaagtgtaatttcatccttgaaaagtcaaagatttgttgttttggcatattgtcaagtttttaaaatttaaaatacagttagttcaaaatatattcacagctttcattcatgagacatttataaatattgggttataaagttccacatttagtatttaactcaaaaaaaaaaaaaa

SEQ ID NO: 1807 - DNA, 2153 bp, Homo sapiens
cagggatctgtcttcctcctatttgcttgagcagacccgccctgagtctaattgacacaccaggtgggtttatgggcttctccttcctcccaagcatcccacagccacgttgcctattgtctttgtggcaagtcttgcccggcagcctagcttcagagcaatgtaagtggttgctgttatacccttctacccaccatgtgctggaaagaggagcatcatgactaaaaggcatgactcatgttctaatccatggcactactgatcctacttttctgcattttaaagtacaaacagctggatattgctgaagatggctcagggggtcaaggacaaatttcacaaatgtgacctcattctccaggctgcctgtttatcctggaggttgatcttggacttgggaccatttaaggttgcctatcttcaaagtgctcagcttggctttttaattctatactcctaaatctttgacagctgtgcatcaacaagctttcaaggtaactgaagcctagggcagctttctgccctctgttactggtgaatgtttttgcctgttggaaggacgttgcagctacaggcagactcccaccatccaccaacggccttattgtcaatccatagtcgtgtgctgactgcaaagtggcctgagttttttgcatatcttgtgagatcactatgggaacgcagtcattataatacagcagttcctgtcttgaggacttttgatagttttatttcttacagtttcatttcctattgatacaaaagagactcttggtaaccaaaaataaatgtaaccagaaatgtcggattctttgtttcatatatgaacatgattttgtaatgtaaattgaataagcccagatctattatgcaactatatactctcgtaacaagtgagtcacagaagcctccgtcaacactgacatattgatgaccttaagaagttagtgattacctatgatgtacaacaaacaaggctggtagctgccagcagaaactaggcataactacttctagtaagtactactactagttctaaaatttaaattaaatcagctcacaccttattttgtgctgctaccactaaaatccaagccaccatgacattatcactaacctggactactaactcatctttccgctttcactctgaccccctccattcattttccctggtgaagctagtgtcatcttataagtaaatcagatcatgtcattcatctcacaactcatctgctttccatctcaccgcaggatagaatccaaactcatcaccatggtctgtgagaccccctgtgatctggcctgcctgactctccgatctcatggcattaccactcccttccctcttgtgatgatctgtccgcaacgactttgctgtttctcatgcctggcccactatgtgcagacatgcaggttgtacaatgcataactccaagagaggcattcagtaggctgcagggtgaatgatgcccttggaagtatgtagtgtggtgaccctggtcacacgcacagctctttcctaccacaaagccttggcacttgctggcctttctgcctggacatccatctgaagattttttgcacagctggctccttcttgtcattcccttgacaaatattccaccaaacactactccataccagggaggctccataccaggcaggaccagctatatactttgcaggtcccagtgcaaaatgaaaaccagggccccttgttcaaaaagtattaagaatttcaagacggtgacagcagaacattaaactaagcatggggcccttctcagtgcggggccctgtgggacaacataggtcacacctccatcaagatggtaagggtttcacatgtattcatgaactcaattgtattttaaagtttagtagaaattgcacaattaataactggttagtgtatatttacctctgcctttggaagttaaagtttttttttttttgaactaaaaattccttaagtgtaatttcatccttgaaaagtcaaagatttgttgttttggcatattgtcaagtttttaaaatttaaaatacagttagttcaaaatatattcacagctttcattcatgagacatttataaatattgggttataaagttccacatttagtatttaactcaaaaaaaaaaaaaaagga

SEQ ID NO: 1808 - DNA, 13216 bp, Homo sapiens
tggcattcagcaatataaaaagggaggtggtgccgcaggaaagggtggaactggaaacactcctggtttcttacttttctccaaggactcctagaagtaccccaccccacccctgctccttggaggacaacgtgatcactgtattcagctccatcaagaatggtccaggttcttctagatgatctgcacaaatggttcctctcctccttcctgatgtctgccattagcattggaataaagttcctgctgaaaatccacatctcccctgggtccggtgttctggaagtgagagagacaatgtcacacttcaaggaggcagctctctagacaggaaggttattcacgtcccatgtcaagtctagctagagttcagagcaattgagaagtgcaattttatctcctgcctttcattctataccctgcttctgaaccatcgtgttcaactgtgaaactcacactttggtgaccctgactccaaaacttaatacacccaaggtcagccccagtgatctgcttcatagccaggactttgggtgggtcttcccagggagtagggcaccctcagagaatgtggctttggacttcatcacagctggggccttttgtgtcacttcagatctaaacttgtaaccgtgctagatctgcttctaacgtgacaacatcacgaaccacgagtccagaagcctaatccataatcctccctcctcatgacgaagtctcatgctctgtgctcaacatggttagctgcacaagatgtaaaccaaagcttcactgaaccctcgacccaaatcggtaactcaagtgcatcaatcataatgaacctccccgaactcagtatttatgattatttttgaggcagggtctcactctgtcgcccgggctggagtgcagtggcaggatcagggctccctgcagccccgacctcccaggctccagcgatcctcccgcctcagcctcctgagtagttgggagtagagatgcctcccacatcgcctggctaatttttgtatttttgtggagaggggatctcgccacgttgcccaggcttgaagccagatcaagcaattgggttccttggatttccgaaatagaccccaatattctgcctttaccccggaggatgcagatgtaccttctctcaggccgatgacctcaggcctccacggtccctggagctctaggaaaggtgggcgcgatctcgcgcccacacccagtgctctgggtcataagcctggatctggaaaaacaaacgcgctttgagaagacggggactccccaggatacccctctctcccctcgtccagcctccagcccacccgattcctccccacatcctccacgtccccaggccccacccacctcttccaactcctccagggaaacccaagccctgcagcgcatggaacaaaagaagtggaaccgatacttccggaacaaggctatctgagagcagttcttcctggccctcgggttcatgtaacggcataactggaaccaaagctcactgagcaagggtatatgagagcgggtctcctcgtacaggaagtagaagatgttttgtttgggggcctcgtcgtcctcctccatgtcattggccagatagctgaggacagaaatcaggttgctgctcaggggcaccaccaggagagacctccggctgaggtcagcttctcagagaggaaggtaagggaccgtccctagctcaggactggcacccaccctgcagagagccacgccttcctcaggagggctctgctggacagagacctgatcaagggcgtctcccactccttcaggatggagacaaaaacccaactggtgaccaagagtggtggcttatgcctggaatcccagcacactgggaggccgaagcaggaggatcacttgaggccaggagtttgagacaggcctgggcaacatagcaagaccctcgtctctattaaaaatataaaaaatacgccagacgtggctcatgcctgtaatcccagcgctttggaaggctgaagcaggtggattgcttgagaccaggagtttgagaccagcctggtcaacacagagaaaccccatctatactaaaaatacaaaaatcagcctggtgcggtggcacacccattagtcctagctactcaggaggctgaagcataagaattgtgtgaacccaggaggcggaggttgcagtgagccaagattgggcccctccattccagcctgagagacacagcaacactcttgtcttgataaataaataaataaataaataaataaataaataactgtccaggtgtggtggtacagccctgtagtcggagctaatcaagaggctgaggtgggaggatcgcttgagcccaggatatggaggctgcagtgagctatgatctcaccactgcactccagcttaggggacagggcaagtctgtctcaaaaaaaaaaaagcaattgaatacactgatattttgccaggaccctgccttctacaggcatctagtctaatgggactgggagtaatcaggggagatgacctaatcccaatgtcacattataataggatgtaactggagagctacgggcatgcagaagttggaagacgagggaaggcatcacagaggctgtgaggtgaaccgacttcaaggaatgggtccttcccttcagagccacatgtgtgcgggacacccagacagaaaacacaaatgcaaagtcaagtggagggcatttggaaggagcagtgaagccaagccaggaaacaccaagatggcgagccagtgtggttgtagagattgtagagagggtggaattggcactgtggaccctggcctcgatagagaaagacatcagctaaggaagttgttcaggtgggcagtgaggttgtcgtgctttggaaagatgttcaggctgcactaggaagccccttggcttggggagagactccaggaaaccccagcagggagcatttgacagtggattcgagtgatgcaagggggacctggactgtgacctctgtcacgggaacccggaggaggctgatggcttttgcggttgatgtgggaaggagagagagagaacaaccggaaacgtctgcttgctgggggaagtgtcatgtccgctcctccgctccttttcttctccccttaggagcggttcatggttccttttgttttttgttcttttttttttttttttttttgagactataatcctgtcttttttgtacacagagtaaagaggacaaataggtgaaagaataaatgaaaggctggaatcccacttcccccgctgtcccagggcattggatattgacggataggaggcagcaaaccactcacagagccaggaagaaatgaatgcgttggtattgccaggaggggaggccggcccggctgaaatacgctatgaccatagccaggagatactgatggagagaaaggaacacagagagggagaggtcacatcttgggagaggaagattgtggatatagtggaatgggggtctggggaggggttgcccatcagagaagggacctcagtgttggggtgactgtgctcatgtggaaattgcggggtggaggggtattcgaaggtcggatgcaaatccgagaagccggaggaagggttttcggtgatgctcccaggatggtgggctccgatgggatctttggagggggtgtgtctaggtcggctggtgtcaggagggtcttttgtgtgccaggcagagaactgtcccaaggagctgagagtagagggcccaggagcttcagggctgcagccagactgtggcccagggctcagatcccaaaggacccataggagaggcaggggccactcattcactctgcaagagaccagcagaatcctgacggagatgctgacaaatcataaaaagacaaagaatagccgggagtggcagctcaagcctgtgatcccagtactttttgagaggtggagacaggaggatcatgtgagcccaacagttggagaacaacctgggcaacacagcgagaccctgtttctaagaagatttcaaaaatgagttgagcatggtagcatgtgcctagtcccagctcctcaggaggctaaggaaagaagattgcttgagcccaggaattagagtgagctatgatcatgccactgtactccatcctggggagcagagctggactctgtctcagaaaaaaaaatgtgtgggtgccaagactcaagaccatgggagctggtcagacacagtgctgacgtctgtaatctgagcactttgggaggccaaggcgggtggatcacctgaggtcaggtgttcgggaccaatctggccaacatggcaaaaccccgtctctactaaaaacacaaaaattagccaggcatggtggttcatgtttgtaatcccagctgcttggaggctgaggtgggagaatcgcttgaacccaggaggcatcagctgcagtgagtcaagatcgagacactgccctccagcctgggcaacagagcaagactgtgtctcacaaaaaaaaacaaaaacaaaaacaaaaaaaaactgtaggagcatctggtgggaggtggtggacggagaactgtgggtttggaagctgcgccctctccctggccgtgcgttagaacaggaacacagttacatagagaacaaccttaccttgtccgacaccctcagatctttgtcccaggccaggagtcttttaatgacaggatcctctgtgattagagagcagatgtcagtgtgagaagcaggacagggtttccctgagagcagcagggcagcgaggagaagtgtgcctcccgggggaaagtctcaggattgtggctgcgggtgaggtggatgggagaggggagaatgactttcactgggcaagggagagaggctcctgctctgagactcccctgagaagaggccgaaggaggccctgggtgtgagaatctacaggatgtagagctgggaatcagccaggaccccctccagcagacacggagggaccactgcagagtcataaaggaattcccatcatttcctcatgagacagtcacacatcagggtgtgaccatggccttggtatccctcactatggatggaaacacttaggtttagaaaagtcagtaagaaacattaagtttcagagggcacagctgaaaccacttttttgatttttgattttgtttttctttatttgatttttatttttatttatttattaatttattttgagacagagtcttgctctgtgggccaggctggaatgcattggcctgatcttggctcactgcaacctctgcctcctgggtttaagcagttctcctgtctcagcctcccgagtagctggaactacagggatgagctactgtgcccagccttggtttttcttttgacgcagagttttgctctgtcacccaggctggagtgcagtggtgcagtcatagctcactgcagcctcaaagtcctgagttcaagcaatcctcttgcctcagcctcccaacgtgctgggatctcaggcgggagccacagcgcctggcccaaaaccaagctttcttatcccaagcaccgacctttatcaagtctacctaatcctctgttgtctcctaagtgtccctcatgagtgatcacttcagagtcctcccgcatggagagctcacccactggggcatatttttcccattggaaaagtgtggttattggaagtttcctctttagaaagaacaggattggaggtgctctctggggtgtcctcctaccaagcagcctgttgaaggcctcgtagtactcagggagcacgagcgacactcgccgtcgcttcgccttcatcttgaggccacacagcgtctccgccacccaggtctcctcaggctcaggggcgagctccttctctggctcatcatcagattcatccaaacattccctcttccttttccagccaagggacctacgtggggggctgggatctaccccaggggctgagtaaagaaaccaggccaccgtgtaatgcttctgcaactgatcacgttagaccccgaccccaaaccccaaaccactctccatcctccccagcctcgcagactgctggcttctccaagccacctttctgactttctcctctgctcaaccccatgtgccactccttcccctccccattcttccctctctctgtcctcagaacactgcctcatatccttccctggtccctggctctctgagtccctctttttttttttttttttttttgtttcgagacagaatcttgctttgtcacccaggctggagtgtagtggtgcaatctcagctcactgcaacatccatctcccggattccatttattctcctgcctcagcctctcaggtagctgggattacaggtgcctgccataatgcccagctcaattttgtacttttaatagagacagggtttcaccatgttggccaggctggtctcaaactcctggcctcaagtgatctgcctgccttggcttcccaaagtgctgggattacaagtgtgagccactgcacccagcctgaatttctccattcttcccacacaccctccccaggttctccttcctgacctctgacccttcttttgtttcttctttttttttttttttttttttgagatagcatgtcactctgtcacccagactggagtgcagtagcacgatctcggctcactgcaacctcttcctcccaggctcaagtgattctcctgtcttagcctcccaagtagctgggattataggcacacaccactaccgcctggctaatttttgtacttttagtagagatggggtttcaccatgttggccaggctggtcttgaactcctgacctcaggtgatctgcccgcctcagcctcccaaagtgttggggttacaggggtgagccaccacgcctggcccccttccttcatcttagtcaatcctatgccacctcttcttcctccagtcccctcacctgatggtcccgacacttcatcatccaccacctcctggagggggtaccctgaggtgctccgctgggggctccgctcttcctggggctgcggttgatggctcatcatgatctttcccaaaatctgtcccatctcaccaaacctagtctctgttctgtccttggtcttcttctggacactgctgggatccagaagagtgtgttatcaattctcgaggctgggagaagtcaggagtggagaacagctctgagaagttactgttgtccaactgaactcccaggtgccgacagagtccggtccctccaatcaggaaggtcggaatctctgatgtcatcgctcatgccaacctggcaaccagtttgaaaaaaaacacatgtaactgccaggctgatctcttgtcctggagatcctgggtgaatggtatctcctgccactgtcccaacctcagaccactgtccaaaagcatcttcagggtctccgcatccctctgttccctgtcccagcagaggctgtgtcctctccactcaaagcttgaagcgtgttggggtctcctcttctctgtacatgcccgtttcagagtccagtctggtgggagagggatcaggatgggaaagaaaagtagggtaagcagaaacgatgaaaccttacaagagtgagattatcatgtacaagagatcccaggaacattgacttgatgaaaaagtcacatcagagcactcaatttggcagaggttttctgccgagtgtctactgacattcactgtccgagattctgtactgggggtacacgcgtcctctgccctaaggcatctttgagtccaagagatattttgaggactggaaatcataggaaactgcccatgagttcacacatatttccaatggtgtccccaatttcagggagtccacggatcacctaaagccagcccctccagtttggctaagaaactctatatatcaagttttgtatcatatgtattgctcttaactcagaaaattccaccatttatagcagtggtttatttatttataccattgaaggaaatggtttatttatgaatctatattatggatattctataagatactgggtgtacaaaaagactaagtcgaaaaatctcagctgtgcacagtggctcatgcttgtaatcccatctctttgggtggccaagggaggaagactgcctgaggccagcagttcaagaccagtataggcaacatagcaagagcccatctctaaaacaaaacaaaacaaaacaaaaaattagccaggtgtcgtggctggcacctgtgttccaacaacttgagagactgaggtggcaggaggattgcttgagcctaggagttaggggctgcagtgagctgtgatcgtgacaccgcactccagtctgggcaacacagcaagaccttgtgtcaaaaaatttttttaaattaaatataaaagagtttcatgacattcagagaccatccaaagaacctgtgggttccggccaggcacagtggctcacgcctgtaatcccagcgctttgggaggccatagcaggtggatcgcttgaggtcaggagtttaagagcagcctggccaacatggtgaaaccccatctcttctaaaaatacaaaaaattagtcaggcatggtggtgggtgcctgtaatcccagccactcaggaggcggggacagcagaatggcttaaacttgggaggcggaggttgcagtgagccaaggtcacaccattgcactccagcctgggcaacaagagcaaaactacatctcaaaaaaaaaaaaaaacaaacaaaaagaacctgtggatgagttcccacatggcttcctaacgggctgcggctctcctaggagtctctcgctcatgggaaaggcacaaactgaatgcggaaggaaatcccattgctatggaagtcccattgttaggaagctctgcttttctggagttcaaatttgcattcatgacgctttaaaccgtcagagctgggtgtgtcctcctacaacaaatcactttactctctctcctagttaacaggctttcaaatattagaacatccatgttctgacttcattaaaattgctcttttgtggaatgaaaagctctgatttaacccgtctttaagcctggtatgcatattcctctctgttccggccaccttgtctagacacactacactgaggcagtgcccatcttagatgatgttgatacattgtcaaaaaatgggcaaaccaggtgcggcggctcacacttgtaatcccagcacttttggaagctgatgccgacagataaccagaggtgaggaggttgagatcagcctggccaacatggtgaaacctgtctgtttttctgtaaaaatacagaaacaatgagctgggcgtgggagtgcacttctgtaatcccagctacttgtggggctgaggcaggagaatcacttgaaccgggaaggtggaggttccagtgagccgagatcacgacactacactccagcctgggcgacagagtgagtctccgactcaaaaaaaaaaaaaaaaaaagtgccagacagcccaggtttggtctgatatgttcagaaaaaagcaaaacagtcacctctcaccttttcttttcctgcaatgatgccgtttaatacaacaatggctgtaggtctgcggcagaaatatcattcaagtgaaacagaagggctttcctggctggacacagtggtcactcctgcaatcccaacactttggttggctaaggtgggaggatttcttgcggccaggagttcgaggctgcagtgagctgtgatccaccactgcattccaggctgggcatcagagtgaggcctgtctctaaaaaaacccttcactccccaaaaaaagggattttcaaataccagcctttcagcatgaggatcacatggaggaacattaagacacagatgctgggacccagccctattgattgtaattaaaaaactgaggtgaggcctgatttagctccatcattggaatccattcagatttgaaattctctgagttggacagtgcaagagagatcctaaagaaagcaaagtcactgtggactgaaatgagctggcaaggttttctgagcgtggtgaaatatgatctgggcctcgcttgggagggctgtggccaggccttgagtccgtggctcagtgggaccttctgaaacagcctccaatccgtgcccccacttcatttgctagtggatgaccccctccagcggctttggtgctgatgggaataagtcaacctgcagcggaagttcagcccaagtttcagcccagcagcttctacacacctgtccgtggtctggtcatgctgccatctctgcggttctctgcggagtcgtggtttctgtaccttgaagagaacttcccctctgggacccagaaacccagtgaatcctcaggaaaaaagggaatgaaattactgaagacaactctgtggcggggagatggaaaagaggctctctctctctttttttcctaatattttgagacagagtttcgctcttgtcacccaggctgcagtgcagtggctccatctcggctcactgcaacctctgcctcccaggttcaagcgattctcctgcctcagcctcccgagtagctgagattacaggcacccaccaccactcccggctaatttttgtattttagggtttcgtcatgtttgccaggctggtcttgaacacctgacttcaaatgatccacccgcctctgcctctcaaagtgctgggaatacaggcataagacactgcacccggcctgtttttgttttttagagacaaggtctctgttgccttggctggggtgcagtggtacaatcagctctctgttgcctcctgggctcaagcaatcctcttctctcagcctcccaagtagctgagactacaggtgcatgcctgtagtagatatagcatcttgctctgttgcccagactggtcttgaactcttggtcacaagcgatcctcttgccttggcctctcaaagtgctggaattacacgcgtgagccattgagcccaaccagataagatgatctttaagggcccttcccatggtaccataatccaagtcagcgagactgtggctatagcaagtttaacataaccagatacgctagtattatgggctgcatggtgtgccccccacccctaattcatgtattgaagccatgaccctccagaccttagaggtgaccttattggaaccagagtctttacagaggtgatcaagttaaaatgaggtcactagaggccaggcacggtggctcacacctgtaatcccagcacttcgggaggccgaggcaggcagataatgagcccaagagaccgagaccatgatgtccaacatggtgaaaccctgtctctactaaaaatacaaaaattagccaggcgtggtggtgtgggcctgtagtcccagctactcaggaggctgaggcaagagaatcgcttgaacccggaaggcagagattgcagtcagccaagatcatgccactacactccagcctgggtgacagagtgagactctatctcaaaaaaataaaaattaaaaaactaaaaacctacagtaccgccttttacataatgcaatggtttggtaagcacatgcaccccagggaggtagtggcagattcagtcaaccttcccagcagcgtggagacgcagtcaggcatagcaggtgttgatgtggtttgaacccacagcttggctcaaatccacactcccctacttagtaccgagtgaagccacttaccctctaagtgccttacttttcttttcttttcttttttcttttttcgagacagagtctcgctctgtcacccaggctggagtgcagtggcatgatcttggctcactgcaaacttcgccttccaggttcaagcaattctcctgcctcagcctcccaagtagctgggattacaggcgcccaccaccatgccgggctaatatttgtatttttgatagagatggggtttcaccatattgcccaggctggtctcgaactcctgacctcaagtgatctgtctgcctcggcctcccaaagtactaggattagaggcatgagccaccacacctggccacttttcttatctatatttgttatgtggatgacttgtgttaacgcaaataagatgctgctcgtcatctttaaagaaaataggtggcaacctgttatagcaagtcctgtttttatttgtacttatgaggctttaattaaacgctaagaattaaaatgcacataataatagactttacctcacaaactggcttcaattattcgatgagacttacatgtattacttaaatgaggttaaatttaaccttttaaaaatgatttattgtggctgggcacagtggctcacacctgtaatcccagcactttgggaggccaaggcagacggatcacttgaggccaggagttgaagaccagcctgaccaacacggcaaaaccccatctccgctaaaaatacaaaaattagccaggcatggtggtgcacacctgtaatcctagctactcaggaggctgagacacaagaatcgcttgaacccgggaggcagaggttgcaaggaggtgagatcacaccactgcactccagcctgggcaatagagtgaggctctgccttaaaacaaagaaaaatgattttgggggatgatggggtgtcactatgttgaccaggcttgtctcaaactccttgcctcaagcaatccacccacctcagcctcccaagtagctggaactacaggcgcatgccaccacgcctggctaatatgtgtgtgtgtgtgtgtgtgtgtgtgtgtgtgtgtgtgtgtgtgtgtgtagaaacaaggtcttactgtgttgtttaagctgctctcaaactcctgggctcaagtgatcctcccacctcggcctcccaaagcattggaattacaggtgtgagccacctcactgagccctccacctttcagctgaacgcagaaaagtacaatcttttaacccaaagcgttcctcacacttagggtcaggaagagcccttcatgccctggaggcaactactaaccctctgctaaacactctgactctgggtgtgagaaacacacctactgtgccccacatatttttccaaatacaacttaatttagccttcacgacaaccctggagtgaaggatcattaactttatttcatagatgtggaaactgagactcagaggcaggaaatgacctccttctggaggctgcaaattctttgatgctcctttgatcaacaggtgggagctggccagaggtggtggctca

SEQ ID NO: 1809 - DNA, 39068 bp, Homo sapiens
caggaggcggggcgcctgtgggagccgttgagggcactttcccagtccccgaggcggatccggtgttgcatccttggagagagctgagagctcgaggtgagctgggctcgcggtcgcccctctcgctcgccctctttgagaaccacggcttccgacctccctggaaatggggggaacatggccgaggcgcgtgggaggccgcctcgtggaggccccggagcggcatcctcagcgccccagcgatccggtgcccattaggtgcgccttgaagccgaggcaagctccttcggggtgctgggctgcgggcaaagaattcggccctgtgaagagttgggttcggcctgtctcaggccctgcccacatcccatcacagggccgtggacttgaagccggaacgtgaaatccccatagactgaatgcatttcctttctacctgttctctctccccttttatttttatttttatattattttatttttaatttttattttatttttttgtagagacggggatttcgctatgttgcccaagctggtctggaactccggagctcaagcagtccgcccgccttggccccccaaagctctggaattacaggcgtaatgcactgtgcctggccttttaaaaaaaaattgaggttattttggggacagtagagcgtccagacacatcctaatttgcgtagctgctcagttttaaaaaatgcaatgcatttttacctcttagggtatgtgatttctggctggtaagctacaccgaatcttggctagcacagttgaattccatgtcagatttgtaaacgcaaatttgctctctgcatttaaatatattagatatatttaggtaactacatttaaatgtattgagacatttaaatacacttgccgtctgtatctaaatatctgaagtggaccaggtgcggtggctcacacctataatcccatcactttgggaggccaaggcaagtggatcatgaggtcaggagttcacgaccagcctggccaacatggtgaaatcccatttctactaaaaatacaaaaattagctgggcgtggtggcaggcgcctgtaatcctagctacttgggaggctgaggcaggagaatcgctggaacccaggagacagaggttgcagtgagctgagattgcaccactgcagtctagcctgggtgacacagcaagactccatctcaaaaaaaaaaagaaaaaaaatcagaagtgaacctgtagcctgtagtgtgttgccaaataaacttatttttagagatacttctttccattttctgtgaggtcatctgcagtttcacatggtagacagacttaggtgagattcttagcaacatagaatgaacagtaaagaggtttgtttatttcacaagggtttattgaaggcctacgatgtgttaaatgctgtaggaaatacccactaatttctcttttcatgtaggtttcccgccttctcttaacgagtgatcaattaaactgtttactgggaacttgctaagttaatgaacacacgggatacattctttggatgagcagacattgggcagaggggcaagaggagagcagtttagacagagacctgcttatacactgtagtgtctaagagagcttgtgatgttcaggaaacagttgttcactgtgctgcaatataggggacggccagttgcggtggctcacacctgtaatcctagtgctttggaaggccaaggcgggcagatcacctgaggtcaggagttagaaaccagcctggccaacatggtgaaaccccatctctactaaaaacacaaaaattagctgagtgtaatggtggatgcctataatcccagcaacttgggaggctgagacaggagaatcacttgaacttgggaggtggaggttgcagtgagccgagatcatgccattgcactctagcccaggtgacagggtgagactctgtctcaaataataataataataataataataataataataataataataataatgtaggggacttgatgaagggaaaggatcagagagattctgaaaagaaggtagtttggggcccagtgatgactagattttaagtttcatatagtaggaagtggggcactagtaatttttcaagcagaaaaattatttgaccagattcgtgatttcaaaaatagctctggtgatagagtggaggatgggttggagcagggaataaggggaaatgaaaccgttataaaactcttaaagtgggctgggcatggtggctcacgcctgtaatcccagcactttgggaggctgaggcgggcggatcacgaagtcaagagatcgagaccatcctggctaaaacggtggaaccctgtctctactaaaaatacaaaaaattagctgggcatggtggtgggcgcctgtagtcccagccactcaggaggctgaggcaggagaatggtgtgaacccgggaggcagagcttgcagtgagctaagatcgtgccactgcactccagcctgggcgacagggcgacagagcaagaatccgtctcaaaaaaaaaaaaaaaaaaaaaaaaacctcttaaaacaagtacagcaagaactttgagggtctttgctaagacagcagctggcagcttcaatttggagtagggtatcaaaggcaactgtgtataaggaatagttatataactggtatccaatttctgagatgattttgacttaaacattgtgtatttcccagcatactgttggtttttctaattatgtgggaaattatgttgcttttacttttttttttgctcattgcccagcctagggtgcaatgctgcaatctcagctcactgcaacctccgcctcccaggtttaagtgattcttctgcctcagcctcccaagtagctgggattacaggcgcccaccaccatgcctggctaattttttgtatttttggtagagacagggtttcacgacgttggccaggctggtctcaaactcctgatctcaagtgatccacctgcctctgtgtcccaaattgctgggattacaggcatgagccaccgcaccggccatgctttcagttttcaagaaagaagacaccattattgccaaagattttggtaatttgagagatacaatgtatgttttctccatgtggatactagatagtaaggatgtgttgaatttgaagtgtctatccagaagtattttgggtacttgtttaaggattgtaaaacaatgtttccatttctggatataataaatgtatttgttaatataataaatgaatagattagacccataaactatttgcagtgttgagtcatttcccacagttaaaatcaggatgaaaatatatagctgaatacctgctttgtttcttgtaactgatttctttagtacagaacctgctaaggccatcaaacctattgatcggaagtcagtccatcagatttgctctgggccggtggtactgagtctaagcactgcggtgaagaagatagtaggaaacagtctggatgctggtgccactaatattggtaagtttgggagagttttaagccacaagaaatgatcagtgaatgttgttgtagtcaagaaacatttgttattgaaataagactatcaagtgttgatgtagtaataaactattatttttaagttaaagttagcacctattatgtgcctagtacttagctaggtagtaataataataacgacagcttttcttgtgttcttatggtgtgccaggcaggtgttatgctaagaattgcacagaaatatctcatttaatttgcagaatagctgggcgtggtgtctgacgcctgtaatcctagccctttgagaggctgaggtggggggattgcttgaagccaagagttcaagaccaacctggccaacatggggagacctcgtctctattaaaaaataaagcaggccgggtgtggtggctcacgcctgtaatcccagcactttgggaggccaaggcgggtggatacctgaggtcaggaattcgagaccagcctgtccaaaatggtgaaactctgtctctactaaaaatacaaaaattagccagacctggtggcagaagcctgtaatcccagctactggggaggctcaggaatgagaattgtttaaatttgggaggtggaggttgcagtgaaccgagattgtgccactgcacgccagcctggggacagagcaagactctgtctcaaaaaaataaaataaaataaaataaaataaatcctggagtagtggctcacatctgtaatcccagcactttgggaggctgaggggggctgatgctttgaggtcaggagttcaagaccagcctaaccaacgtggtaaaaccctgtctctactaaaaatacaaaaattagccagatgtgatggtgcatggctgtactctcagctcctcagaaggctgagggaggagaattgcttaaacctgggaggtggaggttgcagtgagccaagatcgattgtgccactgcattccagcctgggtgacaagagcaaaagtccatctcaaaaaattaaaaaaaaaaaaaaaaaggaaagaaaaaaaagaaaatgacaaaattaaaaaaaaattattaatctgccaaataactttatgagatagaacttattacctccattttacagttgaggaaattaagggacagtaaatttcctttttttgagattataaagctaataaaatagaatctaggaagtctgattccagaaccagttctgttttttttttctttttttttttttttttgagatagagttttgctcttgttgccgaggctgcggtgcaatggcacgatctcaactcactgcaacctccacctcccaggttcaagcgattctcctgcctcagcctcacaagtagctgggattacaggcatgcaccaccacgcctggctaattttgtatttttagtagagatagagtttctctacgttggtcaggctggtctcgaactactgacctcaggtgatccgctcgctttggtctcccaaagtgctgggattacaggcatgaaccactgcgcccggcccccgttctccttactgggtatgttaaaattatttctttcaaaggaaaaggctggtcaaagtgcaacggtctttacaactaattgatcacaaccagttacagatttttttgttccttctccactccaactgcttcacttgactagtgtaaggaaaaaaaaaagaggaaagaaagaaaatgctaaactatttaatctgggctagtaaatggccagaaagaactttataaaaatgaaatatacaaaatgacactagtatgtttaactaaaggtatagttacgacacttaaatttgcacgttataaataatatcaatataaaagctgatagcgtgggtccatttttaataaatatataaatattttaaactttctagatctaaagcttaaggactatggaatggatctcattgaagtttcaggcaatggatgtggggtagaagaagaaaacttcgaaggcttaagtaagttaactttctaatcctattacaaaataattgggccacatgtcttagaattttgagtaacactgtcttgggaaacacaaaaacagttttttaaagccagttactagatatcatgtatatttgttgttatagcacttgagatatcttagtccttactttacagtctctttcagctctgaaacatcacacatctaagattcaagagtttgccgacctaactcgggttgaaacttttggctttcgggggaaagctctgagctcactttgtgcactgaggtgagaaaatatttttatccattcacttgaccccttagaaaaacctctctgaaaattaattggaatcattattatttacaattttctatctcaatatctcagcttctagcttctgaattctgttttgtctcactgccaatctaagtcctagtacttctgaaatgtgagcaataaatgaatgaaatgaagcaaatagtattgtttaaaaaattggttacccttattaaaacagtaacttctcaatttgaacataacatatagataataaatgatagttaccattggttttcattatcaatttttagggaaacatttcaccaaagcactatttaattacagcacagatactaaatttttataaataattacatgcacacacacatatatatacatatatatacatatatatacatatatatatacatatatatacatatatacatatatatacatatatacatatatacatatatacatatatatatacatatatacatatatatatacatatatacatacatatacatatatatacatatatatatacatatatatatacatatatatgtatatatatatttttttttttttttttagacagagtcgcactctgtcacccaggctggagtgcagtggcacagtctcagctcactgcagtctctgcctcccaggttcaagtgactttcgtgactcagcctcctgaagagctgggactatagcgtgcaccaccactcctggctaatttttgtatttttagtagagatggggttttgccatgttgcccaggctggtctggaactccaggcctcaagtgatctgccctccttggcctcccaaagtgctggaattacaggcacgagccaccgcaccctgccctacatatacattttaattataatatcttttggattctttaaaaaaaattttaaaaattttaaaaaattctttaaaaaaattcttttaaaaaattttgtttgaagagtaataacaaaacaaatctctatttgagaatcaataaatcttgagatcatttatggttttgcaattcaacctgaaaaatgaagtcaaagcttttatcaaaacaaagcatgtttagtgctctctgtctcactgtcttttagatgccagaccttagattttgtgatgactcctcaaccgtttagatctcggttatctcagagggatcatcagctttttaagaaaattttgagagaaaagcaagtgaagaaaagagtagtcagtgcccaacatcatggatctctcactgaacacaccatgcctggtattctctcacagtgatgtcaccatttctacctgccacgtatcggcgaaggttgggactcgactggtgtttgatcacgatgggaaaatcatccagaaaaccccctacccccaccccagagggaccacagtcagcgtgaagcagttattttctacgctacctgtgcgccataaggaatttcaaaggaatattaagaaggtacagtaaattaatcctggttttcaagagtattggttaatgcacatgagcaaaagatttactaaagatgtttattcttcagttgattctcttcccataatttattgagaaatgctttatttgcatttctcattaaagacttaacttcaggatgatttacttttttctttttatcacataatgtttattaggactgggaaacatagtgagactctgtctctatgaaaaattaaaaaaaaaattgactgggcatggtggcatgcacctgtagttccagctacttgggaggctgaagtgggaggatcacctgagcccaggaacttgagactgcagtgagctatgattgcgtcactacacttcagactgtgagacagagtaagaccctgtctggaaaaatatatatacatatatatacattttttttattttttatttttatctttttttgagatggagtctcactttggcgccctggctgcagtgcagtggcgcgatctcagttcactgcaacctccacctgccaagttcaagcgattctcctgcttcagccttctgagtagctaccattacaggcgcgcgccaccacgcccggctaatttttgtattttcagtggagacggggttccaccatgttgtccaggctggccaggctggtcttgaattcctgccctcaggtgatccgcccacctcggcctctcaaagtgctgggattacaggcgtgagccaccatgcctgaccttatgtacttatatttttatgagaatatttctcttggttttctgataaatgagttactggaacccttatgaatttgaatgcaaatgaaacagctaaatgttatataattgttgtgtttaaaaagcagattataaaactgtctgtattatatgattacagttttataaaaacaaaacaggcctaaatgtgtatagtataaagactgaagagtcagcacttccatgttctcagcggttatccttggatgtgagatctcatgcactttttgctctcttctttgtgcctttccattttgcatgcgtatttcttataatctaaaaagttacttaaacatatgcagctaaaaactttttttacttgtaaagcgtttggtgctaattttaacttttttttttagacggagtcttctcactctgtcgcccaggctggagtgcagtggtgtgatcttggctcactgcaacctccgcctcctgggttcaagtgattctcctacctcagcctcccaagtagctgggattataggtgtgtgtcaccacacccagctaatttttgtatttttagtagagatggggtttcaccatgttggccaggctggtcttgcacccctgacctcaagtgatctgcccacctcagcctcccaaagtgctgggattacaggcgtgagccaccacgcctggcttttttttttaaagcttttttgtaagtcagccagcaagaacacaggaggaagtactcaaatctcccttacacagctgggggctgtgtcaggttttataagcatagggtaatgaggtgtgatttgattggatcttgcaataaagtaatgctgggaggtgtgatctgactggatcctgccatggggtgacaccaaaactcaatctgattggatcctggctcctgcctgggggtgtctggttcttaaatcggtccgagctcttcaggctgagctcttaggttccactccacggtggcacgcgtggttaacctgggcatgcacagggtacatgaccttcaacctgcaggtcgatggcaattggaaaacaactgacaacttcattacataaaagttgaactgattcgggtgcggtgactcacgcctgtaatcccagcactttgggaggccaaggcaggtggatcacctgaggtcgaggagttcaagaccagcctggccaaaatggtgaaaccccgtctctactaaaaatataaatattagccaggcgtggtggcgcacccttgtaatcccagctaccccagaggctgaggcagcagaatgcttgaacctaggacgtggaggttgcagtgagctgagatcgtgccattgcactccagcctgggtgacaagagtgaaactccatcaaaaaaaaaaaaagttgaactagatttggtctgatgcagttacagatttacaaaccgcgtcccaccctcctgccaacaccttccactcctcattcttgagggattagggatggaggtcatgcttctgtatcgacttcatgctgaccaggggcacttagtcccctaaagtgagaggaatgaaactcttgggcttctgagttcagatgagttctggggtcacccggagtagcttgaaaggctggtattgttgtaatacaagctgaaggtggaagtgttggatcctggaggacaaacagctcaccatccatttaaataaataggaccaaaaagtaacagaacagtggccacgaggggccccaatagaggaagaaaccaggtgaggtgtggtatagtggactcgactgccttctaaatctcagtggttgtccgggtgcggtggctcacgcctgtaattccagcaaaagaagagccgaggcagggtgatcacgaggtcaggagttcaagaccagccgggcaaacatggtgaaaccccgtctctactgaaaatacaaaaattagccaggtgtggtggcgtgtgctgtagtcccagctactagggaggctgaggcaggagaattgcttgaacctgggaggcggaggttgcagtgagccgagattgtgccactgcactccagcctaggtaacagagcaggaccccatctcagtcaatcaatcaatctcagtggttgaactacccttgatatggttcagctctgtatccccaaccaaatctcatgtccaattgcaattcccagtgttgagggagggacctggtgggagatgattggctcatggcggctgacgtcccccttgctggtctcgtgatagtgagcgctcatgggatctggttgtttagaagcatgcagcacctcctgcttcactctctctgtctctcctgctccaccatggccagaaacgtgcctgcttccccttcgccttctgccgtgattgtcagtttcttgagggctccccagccatgcttcctgtacagcctgcaaaactgtgagtcaattaaacctcttttcttcataaattccccagtttccagtagttctttatagcagtgtgaaaacagactaatggacccttctggttgaaggaatgtagccattctgcttgtttaagtatttcctttctattcatctctatttcccgggaggtgtttatccaagtgcaataggagatattggtgactgcagagtcccctcagtgttctgctagtaaatagttgaaggttgatcagtgatctccagcattttcagtctggcatggaaaagcccccatgtaactggtaaaggtatcagtaagcaccaggaggtatctaaatccaccaggagccataggcatcatgttgatgtccatttaccagtcttccctggcaagattctctgaattgtactgccttggccaaaagaggtatgggaggggctgggcacagtggctcacgcctgtaatcccagcattttgggagaccaattcgggtagatcattagaggtcaggggttcaagaccatcctggccaacatggtgacattccatctctactaaaaatacaaaaagtcagcggggtttggtgttgggtgcctgtaatcccagctactcgggaggctgaggcaggataatcacttgaacctgggaggaggaggaggtggcagtgagctgagatctcgccattgcactccagcctgggcaacaagagcgaaacttcatctcaaaaaataaaacaagaagtctgggtgtggtggctcgtgcctgtaatcccaggactttgggaggccaagatgggtggatcatgaggtcaggagttcaagaccagcctggcctagatggtgaaaccctgtctcgagtgaaaatacaaatattagctgggcatggtggcacacacctgtaatctcagctactcagaagtctgagacagaagaattgccaaaacccgggagggagaggttgcagtgagccgagatcgcgccactgcactctagcctgggcgacagagcaagactccgtctcgaaagaaagaaagagaaaggaaattccccagggaagtacctcggcttatttcatgaagaggtactgaaggaagcagaggcatgtggaggacttccccacctcgtgcagctatttgggccgtggcgtctgaaatttcttatttcagagtcacccctttgatgaccttggcagtggactgcagtcatctgtttaggcctctccatggcccgtgtcaatgccgatatttctgtctgttgcacatttgatttccttgttgttggcatttagaaggccccctgtttcccagatcacaccacgggcatggaccgcagagattgcatcttgtgagtctgtagaaacagtcaaggccttgtcctctcttaggtccagagctcaggtgaatgcagattttcccggccatctgtgctgaagtccctgtggggaggctcctggctggtttcctgtaggtagacagctacacatcctgcccttcattggcttcttttcatgaagctcctgctgtctacaaaacatgtctcccttttcttcttgaaccacatctctgttattgaaactctagaagtcagccaggcacagtggctatgcctgtaatcccagcactttgggaggccaaggtgggtggatcacctgaggtcaggagttcaagaccagcctggccaacatggcgaaaccctgtctctaatacaaatactaaaattagccaagcatggtggccactgcactccagcctgggtgacagagcaagactctgtctcaaataaagaaagagaaagtatcatgcttttcagagttctgtgggttgttatggtgaattatcaaacctgaggacgtggtgggaacctccaaatttgcagccagttggtgagaagtacatgcggtctgtggacacccaagcttgcagctgcatctgaagcgagggcagcctagcgggggctggtggccttaacctgtggcatttgatgtaacatcagggagttgacatcagaattacgtcacacaggccaggtgcagtggctcatgcttataatcccagcaattagaaaggcaagataagaagattgcttgagcttgagtctgagcccacagtgagctatgaccgcaccactgcaccccagtctgggtgacagcacaagaccccgactccaaaaataaaaaagaaaaatcacaaagaattgcatggcagagtgcctgtctttcacagcttgaactgttgcaggaactttctttttttttttttcttttgtgatggagtctcgcgctttcacccaggctggagtgcagtggcgcgatctctgctcactgcaggctccgcctcctgggttcacaccattctcctgcctcagcctccggagtagctgggactacaggcgcctgccaccgcacccagctaattttttgtatttttagcagagatggggtttcaccgtattagccaggatggtcttgatctcctgacctcatgatccacccacctcagcctcccaaagtgctgggattacagtcctgagccaccgcgcctggacttttttttttttttttttgagaggggttggggagacatattctctgctagtgattctcctgcctggtctcgaactcctgctgggatcacaggcgtgagccaccacgcccagccacctttagagttttcttaccacctggttttcctctctcaatatctttctctcatttcctgctttaaaactctagcttggggtctgggcacagtagctcatgcctataatcccagcactttgggagactgaggcgggtggatcacttgaggtcaggagtttgagaccagcctggccaacatggtgaaaccttgtctctactatttttacaaaagttagtcagacgtacaggcggatgcctgtagtcccagctacttgggaggctgaggcaggagaatttgcttgaacgccgaggtgaaagttgcagggagccgaggttgtgccactgcactccagcctgggagacagagcgagactgtctccaaaacaaacaaacaaacaaacaaacaaaaaaaccctgtagcttgggatcagccttctcttctgttgtttttctttaaaaaataaaaattaaaaataggcttcaagtgatcctcccgccatgacctccaaaactgctgggattgtaggtgtgagcactgcacccagccgtatgtttttttctacataaaaaacagcacaggattatcttccaaagctaacaaatatgttcaaataaccacaaccccattaaggaaaaatgtcacttgacagcaaataatcaatccagaccacaatatgatcacactcactgtgaaggtgagaaaagttcatctttattatgtttccccaagagatgcactgcactgttctcttgaaaacacacagctcatgtcctcctttagaacacacatcctctttaaagtaacatacaaacatgccaaaacaagataaaaaattccatctgaattctcacatttcaaacatacactaaatatcaaataaaaatttatttttacaagaatttaggggaactaccacatagctataaatgtaatatatatgttaactaagtatcatagataaaaaccatgctcccttcagcagcacgtgtaataatagatacaaagattgaaaggtaaaagatttaggatgaaaagaatcctctcttaaaaaggaaaacaaaattatatgtatgtgtatacaacagttataatacccatcacacagctttatagaaacagcatctattcaaaaataccagtatttccaaaatatttaaaataatatttaaagtaataataatatttaaataaataaatatatttaataaatatttcagtaaataaaataatatttaaataattctatacccatgtttttcaaaataaaccaataaaatagatagtatatattagacgtgttagtatatatatctgagacatgttaaaaatcacaactgaattctcacaagtcagtcacaaacctaaacagcaaataaaaatttctatcaccagaattatgtttttttctggtggggaactaccaatagctataaatagaagagattattatggaagtatcatagataaaaagagtgctcgcttcaggagcacatataataatacagaaaaaaatttaaagataataaaagatttaggataaaaagaattctcacttaaaaatgaaaagaaaattatctttaggtatatataacaactataactctcatcaaaaaactctacaggaacagcatgttttcaaaagtacaacaatttccaaactatttgaaataaacctattaataattcaatggccaacattttccaaacaaaccaataaaatgcatagtgtgcatgaagctatctgttacagtctgtggcactcatatttcacaaagaattctgtgccaatctgagcccctgcactgtgccttcaaatgctcctggactgtggcaaccaagtccataagaaacaggacctccaggttccgccccagggaggttggcattcagcaatataaaaagggaggtggtgccgcaggaaagggtggaactggaaacactcctggtttcttacttttctccaaggactcctagaagtaccccaccccacccctgctccttggaggacaacgtgatcactgtattcagctctgtcaagaatggtccaggttcttctagatgatctgcaccaatggttcctctcctccttcctgatgtctgccattagcattggaataaagttcctgctgaaaatccacatctcccctgggtccggtgttctggaagtgagagagacaatgtcacacttcaaggaggcagctctctagacaggaaggttattcacgtcccatgtcaagtctagctagagttcagagcaattgagaagtgcaattttatctcctgcctttcattctataccctgcttctgaaccatcgtgttcaactgtgaaactcacactttggtgaccctgactccaaaacttaatacacccaaggtcagccccagtgatctgcttcatagccaggactttgggtgggtcttcccagggagtagggcaccctcagagaatgtggctttggacttcatcacagctggggccttttgtgtcacttcagatctaaacttgtaaccgtgctagatctgtttctaacgtgacagcatcacgaaccacgagtccagaagcctaatccataatcctccctcctcatgacgaagtctcatgctctgtgctcaacatggttagctgcacaagatgtaaaccaaagcttcactgaaccctcgacccaaatcggtaactcaagtgcatcaatcataatgaacctccccgaactcagtatttatgattatttttgaggcagggtctcactctgtcgcccgggctggagtgcagtggcaggatcagggctccctgcagccccgacctcccaggctccagcgatcctcccgcctcagcctcctgagtagttgggagtagagatgcctcccacatcgcctggctaatttttgtatttttgtggagaggggatctcgccacgttgcccaggcttgaagccagatcaagcaattgggttccttggatttccgaaatagaccccaatattctgcctttaccccggaggatgcagatgtaccttctctcaggccgatgacctcaggcctccacggtccctggagctctaggaaaggtgggcgcgatctcgcgcccacacccagtgctctgggtcataagcctggatctggaaaaacaaacgcgctttgagaagacggggactccccaggatacccctctctcccctcgtccagcctccagcccacccgattcctccccacatcctccacgtccccaggccccacccacctcttccaactcctccagggaaacccaagccctgcagcgcatggaacaaaagaagtggaaccgatacttccggaacaaggctatctgagagcagttcttcctggccctcgggttcatgtaacggcataactggaaccaaagctcactgagcaagggtatatgagagcgggtctcctcgtacaggaagtagaagatgttttgtttgggggcctcgtcgtcctcctccatgtcattggccagatagctgaggacagaaatcaggttgctgctcaggggcaccaccaggagagacctccggctgaggtcagcttctcagagaggaaggtaagggaccgtccctagctcaggactggcacccaccctgcagagagccacgccttcctcaggagggctctgctggacagagacctgatcaagggcgtctcccactccttcaggatggagacaaaaacccaactggtgaccaagagtggtggcttatgcctggaatcccagcacactgggaggccgaagcaggaggatcacttgaggccaggagtttgagacaggcctgggcaacatagcaagaccctcgtctctattaaaaatataaaaaatacgccagacgtggtggctcatgcctgtaatcccagcgctttggaaggctgaagcaggtggattgcttgagaccaggagtttgagaccagcctggtcaacacagagaaaccccatctatactaaaaatacaaaaatcagcctggtgcggtggcacacccattagtcctagctactcaggaggctgaagcataagaattgtgtgaacccaggaggcggaggttgcagtgagccaagattgggcccctccattccagcctgagagacacagcaacactcttgtcttgataaataaataaataaataaataactgtccaggtgtggtggtacagccctgtagtcggagctaatcaagaggctgaggtgggaggatcgcttgagcccaggatatggaggctgcggtgagctatgatctcaccactgcactccagcttaggggacagggcaagtctgtctcaaaaaaaaaaaaaaagcaattgaatacactgatattttgccaggaccctgccttctacaggcatctagtctaatgggactgggagtaatcaggggagatgacctaatcccaatgtcacattataataggatgtaactggagagctacgggcatgcagaagttggaagacgagggaaggcatcacagaggctgtggggtgaaccgacttcaaggaatgggtccttcccttcagaaccacatgtgtgcgggacacccagacagaaaacacaaatgcaaagtcaagtggagggcatttggaaggagcagtgaagccaagccaggaaacaccaagatggcgagccagtgtggttgtagagattgtagagagggtggaattggcactgtggaccctggcctcgatagagaaagacatcagctaaggaagttgttcaggtgggcagtgaggttgtcgtgctttggaaagatgttcaggctgcactaggaagccccctggcttggggagagactccaggaaaccccagcagggagcatttgacagtggattcgagtgatgcaagggggacctggactgtgacctctgtcacgggaacccggaggaggctgatggcttttgcggttgatgtgggaaggagagagaacaaccggaaacgtctgcttgctgggggaagtgtcatgtccgctcctccgctccttttcttctccccttaggagcggttcatggttccttttgttttttgttcttttttttttttttttgagactataatcctgtcttttttgtacacagagtaaagaggacaaataggtgaaagaataaatgaaaggctggaatcccacttcccccgctgtcccagggcattggatattgacggataggaggcagcaaaccactcacagagccaggaagaaatgaatgcgttggtattgccaggaggggaggccggcccggctgaaatacgctatgaccatagccaggagatactgatggagagaaaggaacacagagagggagagttcacatcttgggagaggaagattgtggatatagtggaatgggggtctggggaggggttgcccatcagagaagggacctcagtgttggggtgactgtgctcatgtggaaattgcggggtggaggggtattcgaaggtcggatgcaaatccgagaagccggaggaagggtttttggtgatgctcccaggatggtgggctccgatgggatctttggagggggtgtgtctaggtcggctggtgtcaggagggtcttttgtgtgccaggcagagaactgtcccaaggagctgagagtagagggcccaggagcttcagggctgcagccagactgtggcccagggctcagatcccaaaggacccataggagaggcaggggccactcattcactctgcaagagaccagcagaatcctgacggagatgctgacaaatcataaaaagacaaagaatagccgggagtggcagctcaagcctgtgatcccagtactttttgagaggtggagacaggaggatcatgtgagcccaacagttggagaacaacctgggcaacacagcgagaccctgtttctaagaagatttcaaaaattagttgagcatggtagcatgtgcctagtcccagctcctcaggaggctaaggaaagaggattgcttgagcccaggaattagagtgagctatgatcatgccactgtactccatcctggggagcagagctggactctgtctcagaaaaaaaaaatgtgtgggtgccaagactcaagaccatgggagctggtcagacacagtgctgacgtctgtaatctcagcactttgggaggccaaggcgggtggatcacctgaggtcaggtgttcgggaccaatctggccaacatggcaaaaccccgtctctactaaaaacacaaaaattagccaggcgtggtggttcatgtttgtaatcccagctgcttggaggctgaggtgggagaatcgcttgaacccaggaggcatcagctgcagtgagtcaagatcgagacactgccctccagcctgggcagcagagcaagactgtgtctcacaaaaaaaaacaaaaacaaaaacaaaaaaaaactgtaggagcatctggtgggaggtggtggacggagaactgtgggtttggaagctgcgccctccccctggccgtgcgttagaacaggaacacagttacatagagaacaaccttaccttgtccgacaccctcagatctttgtcccaggccaggagtcttttaatgacaggatcctctgtgattagagagcagatgtcagtgtgagaagcaggacagggtttccgtgagagcagcagggcagcgaggagaagtgtgcctcccgggggaaagtctcaggattgtggccgcgggtgaggtggatgagagaggggagaatgactttcactgggcaagggagagaggctcctgctctgagactcccctgagaagaggccgaaggaggccctgggtgtgagaatctacaggatgtagagctgggaatcagccaggaccccctccagcagacacggagggaccactgcagagtcataaaggaattcccatcatttcctcatgagacagtcacacatcagggtgtgaccatggccttgggatccctcactatggatggagacacttaggtttagaaaagtcagtaagaaacattaagtttcagagggcacagctgaaaccacttttttgatttttgattttgtttttctttatttgatttttatttttatttatttattaatttattttgagacagagtcttgctctgtgggccaggctggaatgcattggcctgatcttggctcactgcaacctctgcctcctgggtttaagcagttctcctgtctcagcctcccgagtagctggaactacagggatgagctactgtgcccagccttggtttttcttttgacgcagagttttgctctgtcacccaggctggagtgcagtggtgcagtcatagctcactgcagcctcaaagtcctgagttcaagcaatcctcttgcctcagcctcccaacgtgctgggatctcaggcgggagccacagcgcctggcccaaaaccaagctttcttatcccaagcaccgacctttatcaagtctacctaatcctctgttgtctccttaagtgtccctcatgagtgatcacttcagagtcctcccgcatggagagctcacccactggggcatatttttcccattggaaaagtgtggttattggaagtttcctctttagaaagaacaggattggaggtgctctctggggtgtcctcctaccaagcagcctgttgaaggcctcgtagtactcagggagcacgagcgacactcgccgtcgcttcgccttcatcttgaggccacacagcgtctccgccacccaggtctcctcaggctcaggggcgagctccttctctggctcatcatcagattcatccaaacattccctcttccttttccagccaagggacctacgtggggggctgggatctaccccaggggctgagtaaagaaaccaggccaccgtgtaatgcttctgcaactgatcacgttagaccccgaccccaaaccccaaaccactctccatcctccccagcctcgcagactgctggcttctccaagccacctttctgactttctcctctgctcaaccccatgtgccactccttcccctccccattcttccctctctctgtcctcagaacactgcctcatatccttccctggtccctggctctctgagtccctcttttttttttttttttttgtttcgagacagaatcttgctttgtcacccaggctggagtgtagtggtgcaatctcagctcactgcaacatgcatctcccggattccagttattctcctgcctcagcctctcaggtagctgggattacaggtgcctgccataatgcccagctccattttgtacttttaatagagacagggtttcaccatgttggccaggctggtctcaaactcctggcctcaagtgatccgcctgccttggcttcccaaagtgctgggattacaagtgtgagccactgcacccagcctgaatttctccattcttcccacacaccctccccaggttctccttcctgacctctgacccttcttttttttcttcttttttttttttttttttttttttttttttttttgagatagcatctcactctgtcacccagactggagtgcagtagcacgatctcggctcactgcaacctcttcctcccaggctcaagtgattctcctgtcttagcctcccaagtagctgggattataggcacacaccactaccgcctggctaatttttgtacttttagtagagatggggtttcaccatgttggccaggctggtcttgaactcctgacctcaggtgatctgcccgcctcagcctcccaaagtgttggggttacaggggtgagccaccacgcctggcccccttccttcatcttagtcaatcctatgccacctcttcttcctccagtcccctcacctgatggtcccgacacttcatcatccaccacctcctggagggggtaccctgaggtgctccgctgggggctccgctcttcctggggctgcggttgatggctcatcatgatctttcccaaaatctgtcccatctcaccaaacctagtctctgttctgtccttggtcttcttctggacactgctgggatccagaagagtgtgttatcaattctcgaggctgggagaagtcaggagtggagaacagctctgagaagttactgttgtccaactgaactcccaggtgccgacagagtccggtccctccaatcaggaaggtcggaatctctgatgtcatcgctcatgccaacctggcaaccagtttgaaaaaaaacacatgtaactgccaggctgatctcttgtcctggagatcctgggtgaatggtatctcctgccactgtcccaacctcagaccactgtccaaaagcatcttcagggtctccgcatccctctgttccctgtcccagcagaggctgtgtcctctccactcaaagcttgaagcatgttggggtctcctcttctctgtacatgcccgtttcagagtccagtctggtgggagagggatcaggatgggaaagaaaagtagggtaagcagaaacgatgaaaccttacaagagtgagattatcatgtacaagagatcccaggaacattgacttgatgaaaaagtcacatcagagcactcaatttggcagaggttttctgccgagtgtctactgacattcactgtccgagattctgtactgggggtacacgcgtcctctgccctaaggcatctttgagtccaagagatattttgaggactggaaatcataggaaactgcccatgagttcacacatatttccaatggtgtccccaatttcagggagtccacggatcacctaaagccagcccctccagtttggctaagaaactctatatatcaagttttgtatcatatgtattgctcttaactcagaaaattccaccatttatagcagtggtttatttatttataccattgaaggaaatggtttatttatgaatctatattatggatattctataagatactgggtgtacaaaaagactaagtcgaaaaatctcagctgtgcacagtggctcatgcttgtaatcccatctctttgggtggccaagggaggaagactgcctgaggccagcagttcaagaccagtataggcaacatagcaagagcccatctctaaaacaaaacaaaacaaaacaaaacaaaattagccaggtgtcgtggctggcacctgtgttccaacaacttgagagactgaggtggcaggaggattgcttgagcctaggagttaggggctgcagtgagctgtgatcgtgacaccgcactccagtctgggcaacacagcaagaccttgtgtcaaaaaaatttttttaattaaatataaaagagtttcatgacattcagagaccatccaaagaacctgtgggttccggccaggcacagtggctcacgcctgtaatcccagcgctttgggaggccatagcaggtggatcgcttgaggtcaggagtttaagagcagcctggccaacatggtgaaaccccatctcttctaaaaatacaaaaaattagtcaggcatggtggtgggtgcctgtaatcccagccactcaggaggcggggacagcagaatggcttaaacttgggaggcggaggttgcagtgagccaaggtcacaccattgcactccagcctgggcaacaagagcaaaactacatctcaaaaaaaaacaacaaaaaaaaaaaacaaaaagaacctgtggatgagttcccacatggcttcctaacgggctgcggctctcctaggagtctctcgctcatgggaaaggcacaaactgaatgcggaaggaaatcccattgctgtggaagtcccattgttaggaagctctgcttttctggagttcaaatttgcattcatgacgctttaaaccgtcagagctgggtgtgtcctcctacaacaaatcactttactctctctcctagttaacaggctttcaaatattagaacatccatgttctgacctcattaaaattgctcttttgtggaatgaaaagctctgatttaacccgtctttaagcctggtatgcatattcctctctgttccggccaccttgtctagacacactacactgaggcagtgcccatcttagatgatgttgatacattgtcaaaaaatgggcaaaccaggtgcggcagctcacacttgtaatcccagcacttttggaagctgatgccgacagataaccagaggtgaggaggttgagatcagcctggccaacatggtgaaacctgtctgtttttctgtaaaaatacagaaacaatgagctgggcgtgggagtgcacttctgtaatcccagctacttgtggggctgaggcaggagaatcacttgaaccgggaaggtggaggttccagtgagccgagatcacgacactacactccagcctgggcgacagagtgagactccgactcaaaaaaaaaaaaaaaaaaaaagtgccagacagcccaggtttggtctgatatgttcagaaaaaagcaaaacagtcacctctcaccttttcttttcctgcaatgatgccgtttaatacaacaatggctgtaggtctgcagcagaaatatcattcaagtgaaacagaagggctttcctggctggacacagtggtcactcctgcaatcccaacactttggttggctaaggtgggaggatttcttgcggccaggagttcgaggctgcagtgagctgtgatccaccactgcattccaggctgggcatcagagtgaggcctgtctctaaaaaaacccttcactccccaaaaaaagggattttcaaataccagcctttcagcatgaggatcacatggaggaacattaagacacagatgctgggacccagccctattgattgtaattaaaaaactgaggtgaggcctgatttagctccatcattggaatccattcagatttgaaattctctgagttggacagtgcaagagagatcctaaagaaagcaaagtcactgtggactgaaatgagctggcaaggttttctgagcgtggtgaaatatgatctgggcctcgcttgggagggctgtggccaggccttgagtccgtggctcagtgggaccttctgaaacagcctccaatccgtgcccccacttcatttgctagtggatgaccccctccagcggctttggtgctgatgggaataagtcaacctgcagcggaagttcagcccaagtttcagcccagcagcttctacacacctgtccgtggtctggtcatgctgccatctctgcggttctctgcggttctctgcggagtcgtggtttctgtaccttgaagagaacttcccctctgggacccagaaacccagtgaatcctcaggaaaaaagggaatgaaattactgaagacaactctgtggcggggagatggaaaagaggctctctctctttttttttcctaatattttgagacagagttttgctcttgtcacccaggctgcagtgcagtggctccatctcggctcactgcaacctctgcctcccaggttcaagcgattctcctgcctcagcctcccgagtagctgagattacaggcacccaccaccactcccggctaatttttgtattttagggtttcgtcatgtttgccaggctggtcttgaacacctgacttcaaatgatccacccgcctctgcctctcaaagtgctgggaatacaggcataagacactgcacccggcctgtttttgttttttagagacaaggtctctgttgccttggctggggtgcagtggtacaatcagctctctgttgcctcggctggggtgcagtggtacaatcagctctctgttgcctcctgggctcaagcaatcctcttctctcagcctcccaagtagctgagactacaggtgcatgcctgtagtagatatagcatcttgctctgttgcccagactggtcttgaactcttggtcacaagcgatcctcttgccttggcctctcaaagtgctggaattacacgcgtgagccattgagcccaaccagataagatgatctttaagggcccttcccatggcaccataatccaagtcagcaagactgtggctatagcaagtttaacataaccagatacgctagtattatgggctgcatggtgtgccccccacccctaattcatgtattgaagccatgaccctccagaccttagaggtgaccttattggaaccagagtctttacagaggtgatcaagttaaaatgaggtcactagaggccaggcactgtggctcacacctgtaatcccagcacttcgggaggccgaggcaggcagataatgagcccaagagaccgagaccatgatgtccaacatggtgaaaccctgtctctactaaaaatacaaaaattagccaggcgtggtggtgtgggcctgtagtcccagctactcaggaggctgaggcaagagaatcgcttgaacccggaaggcagagattgcagtcagccaagatcatgccactacactccagcctgggtgacagagtgagactctatctcaaaaaaataaaaattaaaaaactaaaaacctacagtaccgccttttacataatgcaatggtttggtaagcacatgcaccccagggaggtagtggcagattcagtcaaccttcccagcagcgtggagacgcagtcaggcatagcaggtgttgatgtggtttgaacccacagcttggctcaaatccacactcccctacttagtaccgagtgaagccacttaccctctaagtgccttacttttcttttcttttcttttttcttttttcgagacagagtctcgctctgtcacccaggctggagtgcagtggcatgatcttggctcactgcaaacttcgccttccaggttcaagcaattctcctgcctcagcctcccaagtagctgggattacaggcgcccaccaccatgccgggctaatatttgtatttttgatagagatggggtttcaccatattgcccaggctggtctcgaactcctgacctcaagtgatctgtctgcctcggcctcccaaagtactaggattagaggcatgagccaccacacctggccacttttcttatctatatttgttatgtggatgacttgtgttaacgcaaataagatgctgctcgtcatctttaaagaaaataggtggcaacctgttatagcaagtcctgtttttatttgtacttatgaggctttaattaaacgctaagaattaaaatgcacataataatagactttacctcacaaactggcttcaaatattcgatgagacttacatgtattacttaaatgaggttaaatttaaccttttaaaaatgatttattgtggctgggcacagtggctcacacctgtaatcccagcactttgggaggccaaggcagacggatcacttgaggccaggagttgaagaccagcctgaccaacatggcaaaaccccatctccgctaaaaatacaaaaattagccaggcatggtggtgcacacctgtaatcctagctactcaggaggctgagacacaagaatcgcttgaacccgggaggcagaggttgcaaggaggtgagatcacaccactgcactccagcctgggcaatagagtgaggctctgccttaaaacaaagaaaaatgattttgggggatgatggggtgtcactgtgttgaccaggcttgtctcaaactccttgcctcaagcaatccacccacctcagcctcccaagtagctggaactacaggcgcatgccaccacgcctggctaatgtgtgtgtgtgtgtgtgtgtgtgtgtgtgtgtagaaacaaggtcttactgtgttgtttaagctgctctcaaactcctgggctcaagtgatcctcccacctcggcctcccaaagcattggaattacaggtgtgagccacctcactgagccctccacctttcagctgaacgcagaaaagtacaatcttttaacccaaagcgttcctcacacttagggtcaggaagagcccttcatgccctggaggcaactactaaccctctgctaaacactctgactctgggtgtgagaaacacacctactgtgccccacatatttttccaaatacaacttaatttagccttcacgacaaccctggagtgaaggatcattaactttatttcatagatgtggaaactgagactcagaggcaggaaatgacctccttctggaggctgcaaattctttgatgctcctttgatcaacaggtgggagctggccagaggtggtggctcacacctataatcccagcactttgggaggccaaggtgggaggattgactgaggccaggagtttgaaactagcctgggcaacatagcaagacctcatctctacaaaaaatacacaaattagcagggtgtggtggtgcacacctgtagtcgcagccactcgggaggctgaagtggtagcattgcttgagcccaggaggttgaggctggagtgagccatgatcaagccactgcactccagccgaggagatggagatagaccctgtctcaaacaacaacaaaaaaataggtgaggatcagccaggcatggtggctcacgcctgtaatcctagaactttgggaggccaaggtgggaggattgcttgaggccaggacttcaagaccagcctgggcagcctagcaagatcccatcccttaaaaaaaagtttttaggctgggcatggtcactcatgcctgtaatcctagcactttgggaggccaaggcaggcgggttgcctgagctgaggagtttgagaccagcctgggcaacatggtgaaatcctgtctctactaaaatacaaaaaattagccaggtgtggtgttgggcacctgtaatcccaggtactcaggaggctgaggcaggagaattgcttgaacccaggaggcagaggttgcagtgagccgagagcgcaccactccactccagcctggacaacagagcgagactccgtctcaacaaaaaaatgtttttaattagccagctgtgatgatgcatgcccatgtcccagctacttgggaggctgaagcaggaggattgcttgagcctgggaggtcaaggctgcagtgagctatgattgcgcccctgcactccagcctggacagcggagggagaccctgtctgaaaataaaaaaagaggtgggggcctatgaccccccctttaattttggcccaaccttagtaacaggatagtcattgagtagggcaaaagtgatgttatgatgtttttcagcctccaatttacagtctaaaacatgtcttgggtaaacacagcaagactccatctcaaaaaaaaaaaaagaaaaaaaatcagaagtgaacctgtagcctgtagtgtgttgccaaataaacttatttttagagatacttctttccattttctgtgaggtcatctgcagtttcacatggtagacagacttaggtgagattcttagcaacatagaatgaagagtaaagaggtttgtttatttcacaagggtttattgaaggcctacgatgtgttaaatgctgtaggaaatacccactgatttctcttttcatggaggtttcccgccttctcttaacgagtgatcaattaaactgtttactgggaacttgctaagttaatgaacacacgggatacattctttggatgagcagacattggttgggcagaggggcaagaggagagcagtttagacagagacctgcttatacactgtagtgtctaagagagcttgtgatgttcaggaaacagttgttcactgtgctgcaatataggggacggccagttgcggtggctcacacctgtaatcctagtgctttggaaggccaaggcgggcagatcacctgaggtcaggagttagaaaccagcctggccaacatggtgaaaccccatctctactaaaaacacaaaaattagctgagtgtaatggtggatgcctataatcccagcaacttgggaggctgagacaggagaatcacttgaacttgggaggtggaggttgcagtgagccgagatcatgccattgcactctagcccaggtgacagggtgagactctgtcaataataataataataataataataataataataatgtaggggacttgatgaagggaaaggatcagagagattctgaaaagaaggtagtttggggcccagtgatgactagattttaagtttcatatagtaggaagtggggcactagtaatttttcaagcagaaaaattatttgaccagattcgtgatttcaaaaatagctctggtgatagagtggaggatgggttggagcagggaataaggggaaatgaaaccgttataaaactcttaaagtgggctgggcatggtggctcacgcctgtaatcccagcactttgggaggctgaggcgggcggatcacgaagtcaggagatcgagaccatcctggctaaaacggtggaaccctgtctctactaaaaatacaaaaaattagctgggcatggtggtgggcgcctgtagtcccagccactcaggaggctgaggcaggagaatggtgtgaacccgggaggcagagcttgcagtgagctaagatcgtgccactgcactccagcctgggcgacagggcgacagagcaagaatccgtctcaaaaaaaaaaaaaaaaaaaaaaaaacctcttaaaacaagtacagcaagaactttgagggtctttgctaagacagcagctggcagcttcaatttggagtagggtatcaaaggcaactgtgtataaggaatagttatataactggtatccaatttctgagatgattttgacttaaacattgtgtatttcccagcatactgttggtttttctaattatgtgggaaattatgttgcttttacttttttttttgctcattgcccagcctagggtgcaatgctgcaatctcagctcactgcaacctccgcctcccaggtttaagtgattcttctgcctcagcctcccaagtagctgggattacaggcgcccaccaccatgcctggctaattttttgtatttttggtagagacagggtttcacgacgttggccaggctggtctcaaactcctgatctcaagtgatccacctgcctctgtgtcccaaattgctgggattacaggcatgagccaccgcaccggccatgctttcagttttcaagaaagaagacaccattattgccaaagattttggtaatttgagagatacaatgtatgttttctccatgtggatactagatagtaaggatgtgttgaatttgaagtgtctatccagaagtattttgggtacttgtttaaggattgtaaaacaatgtttccatttctggatataataaatgtatttgttaatataataaatgaatagattagacccataaactatttgcagtgttgagtcatttcccacagttaaaatcaggatgaaaatatatagctgaatacctgctttgtttcttgtaactgatttctttagtacagaacctgctaaggccatcaaacctattgatcggaagtcagtccatcagatttgctctgggccggtggtactgagtctaagcactgcggtgaagaagatagtaggaaacagtctggatgctggtgccactaatattggtaagtttgggagagttttaagccacaagaaatgatcagtgaatgttgttgtagtcaagaaacatttgttattgaaataagactatcaagtgttgatgtagtaataaactattatttttaagttaaagttagcacctattatgtgcctagtacttagctaggtagtaataataataacgacagcttttcttgtgttcttatggtgtgccaggcaggtgttatgctaagaattgcacagaaatatctcatttaatttgcagaatagctgggcgtggtgtctgacgcctgtaatcctagccctttgagaggctgaggtggggggattgcttgaagccaagagttcaagaccaacctggccaacatggggagacctcgtctctattaaaaaataaagcaggccgggtgtggtggctcacgcctgtaatcccagcactttgggaggccaaggcgggtggatacctgaggtcaggaattcgagaccagcctgtccaaaatggtgaaactctgtctctactaaaaatacaaaaattagccagacctggtggcagaagcctgtaatcccagctactggggaggctcaggaatgagaattgtttaaatttgggaggtggaggttgcagtgaaccgagattgtgccactgcacgccagcctggggacagagcaagactctgtctcaaaaaaataaaataaaataaaataaaataaatcctggagtagtggctcacatctgtaatcccagcactttgggaggctgaggggggctgatgctttgaggtcaggagttcaagaccagcctaaccaacgtggtaaaaccctgtctctactaaaaatacaaaaattagccagatgtgatggtgcatggctgtactctcagctcctcagaaggctgagggaggagaattgcttaaacctgggaggtggaggttgcagtgagccaagatcgattgtgccactgcattccagcctgggtgacaagagcaaaagtccatctcaaaaaattaaaaaaaaaaaaaaaaagggaagaaaaaaaagaaaatgacaaaattaaaaaaaaattattaatctgccaaataactttatgagatagaacttattacctccattttacagttgaggaaattaagggacagtaaatttcctttttttgagattataaagctaataaaatagaatctaggaagtctgattccagaaccagttctgtttttttttcttttttttttttttgagatagagttttgctcttgttgccgaggctgcggtgcaatggcacgatctcaactcactgcaacctccacctcccaggttcaagcgattctcctgcctcagcctcacaagtagctgggattacaggcatgcaccaccacgcctggctaattttgtatttttagtagagatagagtttctctacgttggtcaggctggtctcgaactactgacctcaggtgatccgctcgctttggtctcccaaagtgctgggattacaggcatgaaccactgcgcccggcccccgttctccttactgggtatgttaaaattatttctttcaaaggaaaaggctggtcaaagtgcaacggtctttacaactaattgatcacaaccagttacagatttttttgttccttctccactccaactgcttcacttgactagtgtaaggaaaaaaaaaagaggaaagaaagaaaatgctaaactatttaatctgggctagtaaatggccagaaagaactttataaaaatgaaatatacaaaatgacactagtatgtttaactaaaggtatagttacgacacttaaatttgcacgttataaataatatcaatataaaaactgatagcgtgggtccatttttaataaatatataaatattttaaactttctagatctaaagcttaaggactatggaatggatctcattgaagtttcaggcaatggatgtggggtagaagaagaaaacttcgaaggcttaagtaagttaactttctaatcctattacaaaataattgggccacatgtcttagaattttgagtaacactgtcttgggaaacacaaaaacagttttttaaagccagttactagatatcatgtatatttgttgttatagcacttgagatatcttagtccttactttacagtctctttcagctctgaaacatcacacatctaagattcgagagtttgccgacctaactcgggttgaaacttttggctttcaggggaaagctctgagctcactttgtgcactgaggtgagaaaatatttttatccattcacttgaccccttagaaaaacctctctgaaaattaattggaatcattattatttacaattttctatctcaatatctcagcttctagcttctgaattctgttttgtctcactgccaatctaagtcctagtacttctgaaatgtgagcaataaatgaatgaaatgaagcaaatagtattctttaaaaaattggttacccttattaaaacagtaacttctcaatttgaacataacatatagataataaatgatagttaccattggttttcattatcaatttttagggaaacatttcaccaaagcactatttaattacagcacagatactaaatttttataaataattacatgcacacacacatatatagacatatatatacatatatatacatatatatacatatatatatacatacatatacatatatacatatatatacatatatacatatatacatatatacatatatacatatatatatacatatatacatatatacatatatatacatatatacatatatatacatatatatatacatatatatatacatatatatgtatatatatatattttttttttttttagacagagtcgcactctgtcacccaggctggagtgcagtggcacagtctcagctcactgcagtctctgcctcccaggttcaagtgactttcgtgactcagcctcctgaagagctgggactatagcgtgcaccaccactcctggctaatttttgtatttttagtagagatggggttttgccatgttgcccaggctggtctggaactccaggcctcaagtgatctgccctccttggcctcccaaagtgctggaattacaggcacgagccaccgcaccctgccctacatatacattttaattataatatcttttggattctttaaaaaaaattttaaaaattttaaaaaattctttaaaaaaattcttttaaaaaattttgtttgaagagtaataacaaaacaaatctctatttgagaatcaataaatcttgagatcatttatggttttgcaattcaacctgaaaaatgaagtcaaagcttttatcaaaacaaagcatgtttagtgctctctgtctcactgtcttttagatgccagaccttagattttgtgatgactcctcaaccgtttagatctcggttatctcagagggatcatcagctttttaagaaaattttgagagaaaagcaagtgaagaaaagagtagtcagtgcccaacatcatggatctctcactgaacacaccatgcctggtattctctcacagtgatgtcaccatttctacctgccacgtatcggcgaaggttgggactcgactggtgtttgatcacgatgggaaaatcatccagaaaaccccctacccccaccccagagggaccacagtcagcgtgaagcagttattttctacgctacctgtgcgccataaggaatttcaaaggaatattaagaaggtacagtaaattaatcctggttttcaagagtattggttaatgcacatgagcaaaagatttactaaagatgtttattcttcagttgattctcttcccataatttattgagaaatgctttatttgcatttctcattaaagacttaacttcaggatgatttacttttttctttttatcacataatgtttattaggactgggaaacatagtgagactctgtctctatgaaaaattaaaaaaaaaattgactgggcatggtggcatgcacctgtagttccagctacttgggaggctgaagtgggaggatcacctgagcccaggaacttgagactgcagtgagctatgattgcgtcactacacttcagactgtgagacagagtaagaccctgtctggaaaaatatatatacatatatatacattttttttattttttatttttatctttttttgagatggagtctcactttggcgccctggctgcagtgcagtggcgcgatctcagttcactgcaacctccacctgccaagttcaagcgattctcctgcttcagccttctgagtagctaccattacaggcgcgcgccaccacgcccggctaatttttgtattttcagtggagacggggttccaccatgttgtccaggctggccaggctggtcttgaattcctgccctcaggtgatccgcccacctcggcctctcaaagtgctgggattacaggcgtgagccaccatgcctgaccttatgtacttatatttttatgagaatatttctcttggttttctgataaatgagttactggaacccttatgaatttgaatgcaaatgaaacagctaaatgttacataattgttgtgtttaaaaagcagattataaaactgtctgtattatatgattacagttttataaaaacaaaacaggcctaaatgtgtatagtataaagactgaagagtcagcacttccatgttctcagcggttatccttggatgtgagatctcatgcactttttgctctcttctttgtgcctttccattttgcatgcgtatttcttataatctaaaaagttacttaaacatatgcagctaaaaactttttttacttgtaaagcgtttggtgctaattttaacttttttttttagacggagtcttctcactctgtcgcccaggctggagtgcagtggtgtgatcttggctcactgcaacctccgcctcctgggttcaagtgattctcctacctcagcctcccaagtagctgggattataggtgtgtgtcaccacacccagctaatttttgtatttttagtagagatggggtttcaccatgttggccaggctggtcttgcacccctgacctcaagtgatctgcccacctcagcctcccaaagtgctgggattacaggcgtgagccaccacgcctggcttttttttttaaagcttttttgtaagtcagccagcaagaacacaggaggaagtactcaaatctcccttacacagctgggggctgtgtcaggttttataagcatagggtaatgaggtgtgatttgattggatcttgcaataaagtaatgctgggaggtgtgatctgactggatcctgccatggggtgacaccaaaactcaatctgattggatcctggctcctgcctgggggtgtctggttcttaaatcggtccgagctcttcaggctgagctcttaggttccactccacggtggcacgcgtggttaacctgggcatgcacagggtacatgaccttcaacctgcaggtcgatggcaattggaaaacaactgacaacttcattacataaaagttgaactgattcgggtgcggtgactcacgcctgtaatcccagcactttgggaggccaaggcaggtggatcacctgaggtcgaggagttcaagaccagcctggccaaaatggtgaaaccccgtctctactaaaaatataaatattagccaggcgtggtggcgcacccttgtaatcccagctaccccagaggctgaggcagcagaatgcttgaacctaggacgtggaggttgcagtgagctgagatcgtgccactgcactccagcctgggtgacaagagtgaaactccatcaaaaaaaaaaaaagttgaactagatttggtctgatgcagttacagatttacaaaccgcgtcccaccctcctgccaacaccttccactcctcattcttgagggattagggatggaggtcatgcttctgtatcgacttcatgctgaccaggggcacttagtcccctaaagtgagaggaatgaaactcttgggcttctgagttcagatgagttctggggtcacccggagtagcttgaaaggctggtattgttgtaatacaagctgaaggtggaagtgttggatcctggaggacaaacagctcaccatccatttaaataaataggaccaaaaagtaacagaacagtggccacgaggggccccaacagaggaagaaaccaggtgaggtgtggtatagtggactcgactgccttctaaatctcagtggttgtccgggtgcggtggctcacgcctgtaattccagcaaaagaagagccgaggcagggtgatcacgaggtcaggagttcaagaccagccgggcaaacatggtgaaaccccgtctctactgaaaatacaaaaattagccaggtgtggtggcgtgtgctgtagtcccagctactagggaggctgaggcaggagaattgcttgaacctgggaggcggaggttgcagtgagccgagattgtgccactgcactccagcctaggtaacagagcaggaccccatctcagtcaatcaatcaatctcagtggttgaactacccttgatatggttcagctctgtatccccaaccaaatctcatgtccaattgcaattcccagtgttgagggagggacctggtgggagatgattggctcatggcggctgacgtcccccttgctggtctcgtgatagtgagtgagcgctcatgggatctggttgtttagaagcatgcagcacctcctgcttcactctctctgtctctcctgctccaccatggccagaaacgtgcctgcttccccttcgccttctgccgtgattgtcagtttcttgagggctccccagccatgcttcctgtacagcctgcaaaactgtgagtcaattaaacctcttttcttcataaattccccagtttccagtagttctttatagcagtgtgaaaacagactaatggacccttctggttgaaggaatgtagccattctgcttgtttaagtatttcctttctattcatctctatttcccgggaggtgtttatccaagtgcaataggagatattggtgactgcagagtcccctcagtgttctgctagtaaatagttgaaggttgatcagtgatctccagcattttcagtctggcatggaaaagcccccatgtaactggtaaaggtatcagtaagcaccaggaggtatctaaatccaccaggagccataggcatcatgttgatgtccatttaccagtcttccctggcaagattctctgaattgtactgccttggccaaaagaggtatgggaggggctgggcacagtggctcacgcctgtaatcccagcattttgggagaccaattcgggtagatcattagaggtcaggggttcaagaccatcctggccaacatggtgacattccatctctactaaaaatacaaaaagtcagcggggtttggtgttgggtgcctgtaatcccagctactcgggaggctgaggcaggataatcacttgaacctgggaggaggaggaggtggcagtgagctgagatctcgccattgcactccagcctgggcaacaagagcgaaacttcatctc

SEQ ID NO: 1810 - DNA, 39110 bp, Homo sapiens
ggggcgcctgtgggagccgttgagggcactttcccagtccccgaggcggatccggtgttgcatccttggagagagctgagagctcgaggtgagctgggctcgcggtcgcccctctcgctcgccctctttgagaaccacggcttccgacctccctggaaatggggggaacatggccgaggcgcgtgggaggccgcctcgtggaggccccggagcggcatcctcagcgccccagcgatccggtgcccattaggtgcgccttgaagccgaggcaagctccttcggggtgctgggctgcgggcaaagaattcggccctgtgaagagttgggttcggcctgtctcaggccctgcccacatcccatcacagggccgtggacttgaagccggaacgtgaaatccccatagactgaatgcatttcctttctacctgttctctctccccttttatttttatttttatattattttatttttaatttttattttatttttttgtagagacggggatttcgctatgttgcccaagctggtctggaactccggagctcaagcagtccgcccgccttggccccccaaagctctggaattacaggcgtaatgcactgtgcctggccttttaaaaaaaaattgaggttattttggggacagtagagcgtccagacacatcctaatttgcgtagctgctcagttttaaaaaatgcaatgcatttttacctcttagggtatgtgatttctggctggtaagctacaccgaatcttggctagcacagttgaattccatgtcagatttgtaaacgcaaatttgctctctgcatttaaatatattagatatatttaggtaactacatttaaatgtattgagacatttaaatacacttgccgtctgtatctaaatatctgaagtggaccaggtgcggtggctcacacctataatcccatcactttgggaggccaaggcaagtggatcatgaggtcaggagttcacgaccagcctggccaacatggtgaaatcccatttctactaaaaatacaaaaattagctgggcgtggtggcaggcgcctgtaatcctagctacttgggaggctgaggcaggagaatcgctggaacccaggagacagaggttgcagtgagctgagattgcaccactgcagtctagcctgggtgacacagcaagactccatctcaaaaaaaaaaagaaaaaaaatcagaagtgaacctgtagcctgtagtgtgttgccaaataaacttatttttagagatacttctttccattttctgtgaggtcatctgcagtttcacatggtagacagacttaggtgagattcttagcaacatagaatgaacagtaaagaggtttgtttatttcacaagggtttattgaaggcctacgatgtgttaaatgctgtaggaaatacccactaatttctcttttcatgtaggtttcccgccttctcttaacgagtgatcaattaaactgtttactgggaacttgctaagttaatgaacacacgggatacattctttggatgagcagacattgggcagaggggcaagaggagagcagtttagacagagacctgcttatacactgtagtgtctaagagagcttgtgatgttcaggaaacagttgttcactgtgctgcaatataggggacggccagttgcggtggctcacacctgtaatcctagtgctttggaaggccaaggcgggcagatcacctgaggtcaggagttagaaaccagcctggccaacatggtgaaaccccatctctactaaaaacacaaaaattagctgagtgtaatggtggatgcctataatcccagcaacttgggaggctgagacaggagaatcacttgaacttgggaggtggaggttgcagtgagccgagatcatgccattgcactctagcccaggtgacagggtgagactctgtctcaaataataataataataataataataataataataataataataataatgtaggggacttgatgaagggaaaggatcagagagattctgaaaagaaggtagtttggggcccagtgatgactagattttaagtttcatatagtaggaagtggggcactagtaatttttcaagcagaaaaattatttgaccagattcgtgatttcaaaaatagctctggtgatagagtggaggatgggttggagcagggaataaggggaaatgaaactgttataaaactcttaaagtgggctgggcatggtggctcacgcctgtaatcccagcactttgggaggctgaggcgggcggatcacgaagtcaagagatcgagaccatcctggctaaaacggtggaaccctgtctctactaaaaatacaaaaaattagctgggcatggtggtgggcgcctgtagtcccagccactcaggaggctgaggcaggagaatggtgtgaacccgggaggcagagcttgcagtgagctaagatcgtgccactgcactccagcctgggcgacagggcgacagagcaagaatccgtctcaaaaaaaaaaaaaaaaaaaaaaaacctcttaaaacaagtacagcaagaactttgagggtctttgctaagacagcagctggcagcttcaatttggagtagggtatcaaaggcaactgtgtataaggaatagttatataactggtatccaatttctgagatgattttgacttaaacattgtgtatttcccagcatactgttggtttttctaattatgtgggaaattatgttgcttttacttttttttttgctcattgcccagcctagggtgcaatgctgcaatctcagctcactgcaacctccgcctcccaggtttaagtgattcttctgcctcagcctcccaagtagctgggattacaggcgcccaccaccatgcctggctaattttttgtatttttggtagagacagggtttcacgacgttggccaggctggtctcaaactcctgatctcaagtgatccacctgcctctgtgtcccaaattgctgggattacaggcatgagccaccgcaccggccatgctttcagttttcaagaaagaagacaccattattgccaaagattttggtaatttgagagatacaatgtatgttttctccatgtggatactagatagtaaggatgtgttgaatttgaagtgtctatccagaagtattttgggtacttgtttaaggattgtaaaacaatgtttccatttctggatataataaatgtatttgttaatataataaatgaatagattagacccataaactatttgcagtgttgagtcatttcccacagttaaaatcaggatgaaaatatatagctgaatacttgctttgtttcttgtaactgatttctttagtacagaacctgctaaggccatcaaacctattgatcggaagtcagtccatcagatttgctctgggccggtggtactgagtctaagcactgcggtgaagaagatagtaggaaacagtctggatgctggtgccactaatattggtaagtttgggagagttttaagccacaagaaatgatcagtgaatgttgttgtagtcaagaaacatttgttattgaaataagactatcaagtgttgatgtagtaataaactattatttttaagttaaagttagcacctattatgtgcctagtacttagctaggtagtaataataataacgacagcttttcttgtgttcttatggtgtgccaggcaggtgttatgctaagaattgcacagaaatatctcatttaatttgcagaatagctgggcgtggtgtctgacgcctgtaatcctagccctttgagaggctgaggtggggggattgcttgaagccaagagttcaagaccaacctggccaacatggggagacctcgtctctattaaaaaataaagcaggccgggtgtggtggctcacgcctgtaatcccagcactttgggaggccaaggcgggtggatacctgaggtcaggaattcgagaccagcctgtccaaaatggtgaaactctgtctctactaaaaatacaaaaattagccagacctggtggcagaagcctgtaatcccagctactggggaggctcaggaatgagaattgtttaaatttgggaggtggaggttgcagtgaaccgagatggtgccactgcacgccagcctggggacagagcaagactctgtctcaaaaaaataaaataaaataaaataaaataaatcctggagtagtggctcacatctgtaatcccagcactttgggaggctgaggggggctgatgctttgaggtcaggagttcaagaccagcctaaccaacgtggtaaaaccctgtctctactaaaaatacaaaaattagccagatgtgatggtgcatggctgtaatctcagctcctcagaaggctgagggaggagaattgcttaaacctgggaggtggaggttgcagtgagccaagatcgattgtgccactgcattccagcctgggtgacaagagcaaaagtccatctcaaaaaattaaaaaaaaaaaaaaaaaaaggaaagaaaaaaaagaaaatgacaaaattaaaaaaaaattattaatctgccaaataactttatgagatagaacttattacctccattttacagttgaggaaattaagggacagtaaatttcctttttttgagattataaagctaataaaatagaatctaggaagtctgattccagaaccagttctgtttttttttcttttttttttttttgagatagagttttgctcttgttgccgaggctgcggtgcaatggcacgatctcaactcactgcaacctccacctcccaggttcaagcgattctcctgcctcagcctcacaagtagctgggattacaggcatgcaccaccacgcctggctaattttgtatttttagtagagatagagtttctctacgttggtcaggctggtctcgaactactgacctcaggtgatccgctcgctttggtctcccaaagtgctgggattacaggcatgaaccactgcgcccggcccccgttctccttactgggtatgttaaaattatttctttcaaaggaaaaggctggtcaaagtgcaacggtctttacaactaattgatcacaaccagttacagatttttttgttccttctccactccaactgcttcacttgactagtgtaaggaaaaaaaaaagaggaaagaaagaaaatgctaaactatttaatctgggctagtaaatggccagaaagaactttataaaaatgaaatatacaaaatgacactagtatgtttaactaaaggtatagttacgacacttaaatttgcacgttataaataatatcaatataaaagctgatagcgtgggtccatttttaataaatatataaatattttaaactttctagatctaaagcttaaggactatggaatggatctcattgaagtttcaggcaatggatgtggggtagaagaagaaaacttcgaaggcttaagtaagttaactttctaatcctattacaaaataattgggccacatgtcttagaattttgagtaacactgtcttgggaaacacaaaaacagttttttaaagccagttactagatatcatgtatatttgttgttatagcacttgagatatcttagtccttactttacagtctctttcagctctgaaacatcacacatctaagattcaagagtttgccgacctaactcgggttgaaacttttggctttcgggggaaagctctgagctcactttgtgcactgaggtgagaaaatatttttatccattcacttgaccccttagaaaaacctctctgaaaattaattggaatcattattatttacaattttctatctcaatatctcagcttctagcttctgaattctgttttgtctcactgccaatctaagtcctagtacttctgaaatgtgagcaataaatgaatgaaatgaagcaaatagtattgtttaaaaaattggttacccttattaaaacagtaacttctcaatttgaacataacatatagataataaatgatagttaccattggttttcattatcaatttttagggaaacatttcaccaaagcactatttaattacagcacagatactaaatttttataaataattacatgcacacacacatatatatacatatatatacatatatatacatatatacatatatatatacatatatatacatatatacataaatatatacatatatatacatatatacatatatacatatatacatatatatacatatatatatacatatatatacatatatatatatatatattttttttttttttttttttagacagagtcgcactctgtcacccaggctggagtgcagtggcacagtctcagctcactgcagtctctgcctcccaggttcaagtgactttcgtgactcagcctcctgaagagctgggactatagcgtgcaccaccactcctggctaatttttatatttttagtagagatggggttttgccatgttgcccaggctggtctggaactccaggcctcaagtgatctgccctccttggcctcccaaagtgctggaattacaggcacgagccaccgtaccctgccctacatatacattttaattataatatcttttggattctttaaaaaaaattttaaaaattttaaaaaattctttaaaaaaattcttttaaaaaattttgtttgaagagtaataacaaaacaaatctctatttgagaatcaataaatcttgagatcatttatggttttgcaattcaacctgaaaaatgaagtcaaagcttttatcaaaacaaagcatgtttagtgctctctgtctcactgtcttttagatgccagaccttagattttgtgatgactcctcaaccgtttagatctcggttatctcagagggatcatcagctttttaagaaaattttgagagaaaagcaagtgaagaaaagagtagtcagtgcccaacatcatggatctctcactgaacacaccatgcctggtattctctcacagtgatgtcaccatttctacctgccacgtatcggcgaaggttgggactcaactggtgtttttgatcacgatgggaaaatcatccagaaaaccccctacccccaccccagagggaccacagtcagcgtgaagcagttattttctacgctacctgtgcgccataaggaatttcaaaggaatattaagaaggtacagtaaattaatcctggttttcaagagtattggttaatgcacatgagcaaaagatttactaaagatgtttattcttcagttgattctcttcccataatttattgagaaatgctttatttgcatttctcattaaagacttaacttcaggatgatttacttttttctttttatcacataatgtttattaggactgggaaacatagtgagactctgtctctatgaaaaattaaaaaaaaaattgactgggcatggtggcatgcacctgtagttccagctacttgggaggctgaagtgggaggatcacctgagcccaggaacttgagactgcagtgagctatgattgcgtcactacacttcagactgtgagacagagtaagaccctgtctggaaaaatatatatacatatatatacattttttttattttttatttttatctttttttgagatggagtctcactttggcaccctggctgcagtgcagtggcgcgatctcagttcactgcaacctccacctgccaagttcaagcgattctcctgcttcagccttctgagtagctaccattacaggcgcgcgccaccacgcccggctaatttttgtattttcagtggagacggggttccaccatgttgtccaggctggccaggctggtcttgaattcctgccctcaggtgatccgcccacctcggcctctcaaagtgctgggattacaggcgtgagccaccatgcctgaccttatgtacttatatttttatgagaatatttctcttggttttctgataaatgagttactggaacccttatgaatttgaatgcaaatgaaacagctaaatgttatataattgttgtgtttaaaaagcagattataaaactgtctgtattatatgattacagttttataaaaacaaaacaggcctaaatgtgtatagtataaagactgaagagtcagcacttccatgttctcagcggttatccttggatgtgagatctcatgcactttttgctctcttctttgtgcctttccattttgcatgcgtatttcttataatctaaaaagttacttaaacatatgcagctaaaaactttttttacttgtaaagcgtttggtgctaattttaacttttttttttagacggagtcttctcactctgtcgcccaggctggagtgcagtggtgtgatcttggctcactgcaacctccgcctcctgggttcaagtgattctcctacctcagcctcccaagtagctgggattataggtgtgtgtcaccacacccagctaatttttgtatttttagtagagatggggtttcaccatgttggccaggctggtcttgcacccctgacctcaagtgatctgcccacctcagcctcccaaagtgctgggattacaggcgtgagccaccacgcctggctttttttttttaaagcttttttgtaagtcagccagcaagaacacaggaggaagtactcaaatctcccttacacagctgggggctgtgtcaggttttataagcatagggtaatgaggtgtgatttgattggatcttgcaataaagtaatgctgggaggtgtgatctgactggatcctgccatggggtgacaccaaaactcaatctgattggatcctggctcctgcctgggggtgtctggttcttaaatcggtccgggctcttcaggctgagctcttaggttccactccacggtggcacgcgtggttaacctgggcatgcacagggtacatgaccttcaacctgcaggtcgatggcaattggaaaacaactgacaacttcattacataaaagttgaactgattcgggtgcggtgactcacgcctgtaatcccagcactttgggaggccaaggcaggtggatcacctgaggtcgaggagttcaagaccagcctggccaaaatggtgaaaccccgtctctactaaaaatataaatattagccaggcgtggtggcgcacccttgtaatcccagctaccccagaggctgaggcagcagaatgcttgaacctaggacgtggaggttgcagtgagctgagatcgtgccattgcactccagcctgggtgacaagagtgaaactccatcaaaaaaaaaaaaagttgaactagatttggtctgatgcagttacagatttacaaaccgcgtcccaccctcctgccaacaccttccactcctcattcttgagggattagggatggaggtcatgcttctgtatcgacttcatgctgaccaggggcacttagtcccctaaagtgagaggaatgaaactcttgggcttctgagttcagatgagttctggggtcacccggagtagcttgaaaggctggtattgttgtaatacaagctgaaggtggaagtgttggatcctggaggacaaacagctcaccatccatttaaataaataggaccaaaaagtaacagaacagtggccacgaggggccccaacagaggaagaaaccaggtgaggtgtggtatagtggactcgactgccttctaaatctcagtggttgtccgggtgcggtggctcacgcctgtaattccagcaaaagaagagccgaggcagggtgatcacgaggtcaggagttcaagaccagccgggcaaacatggtgaaaccccgtctctactgaaaatacaaaaattagccaggtgtggtggcgtgtgctgtagtcccagctactagggaggctgaggcaggagaattgcttgaacctgggaggcggaggttgcagtgagccgagattgtgccactgcactccagcctaggtaacagagcaggaccccatctcagtcaatcaatcaatctcagtggttgaactacccttgatatggttcagctctgtatccccaaccaaatctcatgtccaattgcaattcccagtgttgagggagggacctggtgggagatgattggctcatggcggctgacgtcccccttgctggtctcgtgatagtgagtgagcgctcatgggatctggttgtttagaagcatgcagcacctcctgcttcactctctctgtctctcctgctccaccatggccagaaacgtgcctgcttccccttcgccttctgccgtgattgtcagtttcttgagggctccccagccatgcttcctgtacagcctgcaaaactgtgagtcaattaaacctcttttcttcataaattccccagtttccagtagttctttatagcagtgtgaaaacagactaatggacccttctggttgaaggaatgtagccattctgcttgtttaagtatttcctttctattcatctctatttcccgggaggtgtttatccaagtgcaataggagatattggtgactgcagagtcccctcagtgttctgctagtaaatagttgaaggttgatcagtgatctccagcattttcagtctggcatggaaaagcccccatgtaactggtaaaggtatcagtaagcaccaggaggtatctaaatccaccaggagccataggcatcatgttgatgtccatttaccagtcttccctggcaagattctctgaattgtactgccttggccaaaagaggtatgggaggggctgggcacagtggctcacgcctgtaatcccagcattttgggagaccaattcgggtagatcattagaggtcaggggttcaagaccatcctggccaacatggtgacattccatctctactaaaaatacaaaaagtcagcggggtttggtgttgggtgcctgtaatcccagctactcgggaggctgaggcaggataatcacttgaacctgggaggaggaggaggtggcagtgagctgagatctcgccattgcactccagcctgggcaacaagagcgaaacttcatctcaaaaaataaaaaaagaagtctgggtgtggtggctcgtgcctgtaatcccaggactttgggaggccaagatgggtggatcatgaggtcaggagttcaagaccagcctggcctagatggtgaaaccctgtctcgagtgaaaatacaaatattagctgggcatggtggcacacacctgtaatctcagctactcagaagtctgagacagaagaattgccaaaacccgggagggagaggttgcagtgagccgagatcgcgccactgcactctagcctgggcgacagagcaagactccgtctcgaaagaaagaaagagaaaggaaattccccagggaagtacctcggcttatttcatgaagaggtactgaaggaagcagaggcatgtggaggacttccccacctcgtgcagctatttgggccgtggcgtctgaaatttcttatttcagagtcacccctttgatgaccttggcagtggactgcagtcatctgtttaggcctctccatggcccgtgtcaatgccgatatttctgtctgttgcacatttgatttccttgttgttggcatttagaaggccccctgtttcccagatcacaccacgggcatggaccgcagagattgcatcttgtgagtctgtagaaacagtcaaggccttgtcctctcttaggtccagagctcaggtgaatgcagattttcccggccatctgtgctgaagtccctgtggggaggctcctggctggtttcctgtaggtagacagctacacatcctgcccttcattggcttcttttcatgaagctcctgctgtctacaaaacatgtctcccttttcttcttgaaccacatctctgttattgaaactctagaagtcagccaggcacagtggctatgcctgtaatcccagcactttgggaggccaaggtgggtggatcacctgaggtcaggagttcaagaccagcctggccaacatggcgaaaccctgtctctaatacaaatactaaaattagccaagcatggtggccactgcactccagcctgggtgacagagcaagactctgtctcaaataaagaaagagaaagtatcatgcttttcagagttctgtgggttgttatggtgaattatcaaacctgaggacgtggtgggaacctccaaatttgcagccagttggtgagaagtacatgcggtctgtggacacccaagcttgcagctgcatctgaagcgagggcagcctagcgggggctggtggccttaacctgtggcatttgatgtaacatcagggagttgacatcagaattacgtcacacaggccaggtgcagtggctcatgcttataatcccagcaattagaaaggcaagataagaagattgcttgagcttgagtctgagcccacagtgagctatgaccgcaccactgcaccccagtctgggtgacagcacaagaccccgactccaaaaataaaaaagaaaaatcacaaagaattgcatggcagagtgcctgtctttcacagcttgaactgttgcaggaactttctttttttttttttcttttgtgatggagtctcgcgctttcacccaggctggagtgcagtggcgcgatctctgctcactgcaggctccgcctcctgggttcacaccattctcctgcctcagcctccggagtagctgggactacaggcgcctgccaccgcgcccagctaattttttgtatttttagcagagatggggtttcaccgtattagccaggatggtcttgatctcctgacctcatgatccacccacctcagcctcccaaagtgctgggattacagtcctgagccaccgcgcctggacttttttttttttttttgagaggggttggggagacatattctctgctagtgattctcctgcctggtctcgaactcctgctgggatcacaggcgtgagccaccacgcccagccacctttagagttttcttaccacctggttttcctctctcaatatctttctctcatttcctgctttaaaactctagcttggggtctgggcacagtagctcatgcctataatcccagcactttgggagactgaggcgggtggatcacttgaggtcaggagtttgagaccagcctggccaacatggtgaaaccttgtctctactatttttacaaaagttagtcagacgtacaggcggatgcctgtagtcccagctacttgggaggctgaggcaggagaatttgcttgaacgcggaggtgaaagttgcagggagccgaggttgtgccactgcactccagcctgggagacagagcgagactgtctccaaaacaaacaaacaaacaaacaaacaaaaaaaccctgtagcttgggatcagccttctcttctgttgtttttctttaaaaaataaaaattaaaaataggcttcaagtgatcctcccgccatgacctccaaaactgctgggattgtaggtgtgagcactgcacccagccgtatgtttttttctacataaaaaacagcacaggattatcttccaaagctaacaaatatgttcaaataaccacaaccccattaaggaaaaatgtcacttgacagcaaataatcaatccagaccacaatatgatcacactcactgtgaaggtgagaaaagttcatctttattatgtttccccaagagatgcactgcactgttctcttgaaaacacacagctcatgtcctcctttagaacacacatcctctttaaagtaacatacaaacatgccaaaacaagataaaaaattccatctgaattctcacatttcaaacatacactaaatatcaaataaaaatttatttttacaagaatttaggggaactaccacatagctataaatgtaatatatatgttaactaagtatcatagataaaaaccatgctcccttcagcagcacgtgtaataatagatacaaagattgaaaggtaaaagatttaggatgaaaagaatcctctcttaaaaaggaaaacaaaattatatgtatgtgtatacaacagttataatacccatcacacagctttatagaaacagcatctattcaaaaataccagtatttccaaaatatttaaaataatatttaaagtaataataatatttaaataaataaatatatttaataaatatttcagtaaataaaataatatttaaataattctatacccatgtttttcaaaataaaccaataaaatagatagtatatattagacgtgttagtatatatatctgagacatgttaaaaatcacaactgaattctcacaagtcagtcacaaacctaaacagcaaataaaaatttctatcaccagaattatgtttttttctggtggggaactaccaatagctataaatagaagagattattatggaagtatcatagataaaaagagtgctcgcttcaggagcacatataataatacagaaaaaaaattaaagataataaaagatttaggataaaaagaattctcacttaaaaatgaaaagaaaattatctttaggtatatataacaactataactctcatcaaaaaactctacaggaacagcatgttttcaaaagtacaacaatttccaaactatttgaaataaacctattaataattcaatggccaacattttccaaacaaaccaataaaatgcatagtgtgcatgaagctatctgttacagtctgtggcactcatatttcacaaagaattctgtgccaatctgagcccctgcactgtgccttcaaatgctcctggactgtgacaaccaagtccataagaaacaggacctccaggttccgccccagggaggttggcattcagcaatataaaaagggaggtggtgccgcaggaaagggtggaactggaaacactcctggtttcttacttttctccaaggactcctagaagtaccccaccccacccctgctccttggaggacaacgtgatcactgtattcagctctgtcaagaatggtccaggttcttctagatgatctgcacaaatggttcctctcctccttcctgatgtctgccattagcattggaataaagttcctgctgaaaatccacatctcccctgggtccggtgttctggaagtgagagagacaatgtcacacttcaaggaggcagctctctagacaggaaggttattcacgtcccatgtcaagtctagctagagttcagagcaattgagaagtgcaattttatctcctgcctttcattctataccctgcttctgaaccatcgtgttcaactgtgaaactcacactttggtgaccctgactccaaaacttaatacacccaaggtcagccccagtgatctgcttcatagccaggactttgggtgggtcttcccagggagtagggcaccctcagagaatgtggctttggacttcatcacagctggggccttttgtgtcacttcagatctaaacttgtaaccgtgctagatctgtttctaacgtgacaacatcacgaaccacgagtccagaagcctaatccataatcctccctcctcatgacgaagtctcatgctctgtgctcaacatggttagctgcacaagatgtaaaccaaagcttcactgaaccctcgacccaaatcggtaactcaagtgcatcaatcataatgaacctccccgaactcagtatttatgattatttttgaggcagggtctcactctgtcgcccgggctggagtgcagtggcaggatcagggctccctgcagccccgacctcccaggctccagcgatcctcccgcctcagcctcctgagtagttgggagtagagatgcctcccacatcgcctggctaatttttgtatttttgtggagaggggatctcgccacgttgcccaggcttgaagccagatcaagcaattgggttccttggatttccgaaatagaccccaatattctgcctttaccccggaggatgcagatgtaccttctctcaggccgatgacctcaggcctccacggtccctggagctctaggaaaggtgggcgcgatctcgcgcccacacccagtgctctgggtcataagcctggatctggaaaaacaaacgcgctttgagaagacggggactccccaggatacccctctctcccctcgtccagcctccagcccacccgattcctccccacatcctccacgtccccaggccccacccacctcttccaactcctccagggaaacccaagccctgcagcgcatggaacaaaagaagtggaaccgatacttccggaacaaggctatctgagagcagttcttcctggccctcgggttcatgtaacggcataactggaaccaaagctcactgagcaagggtatatgagagcgggtctcctcgtacaggaagtagaagatgttttgtttgggggcctcgtcgtcctcctccatgtcattggccagatagctgaggacagaaatcaggttgctgctcaggggcaccaccaggagagacctccggctgaggtcagcttctcagagaggaaggtaagggaccgtccctagctcaggactggcacccaccctgcagagagccacgccttcctcaggagggctctgctggacagagacctgatcaagggcgtctcccactccttcaggatggagacaaaaacccaactggtgaccaagagtggtggcttatgcctggaatcccagcacactgggaggccgaagcaggaggatcacttgaggccaggagtttgagacaggcctgggcaacatagcaagaccctcgtctctattaaaaatataaaaaatacgccagacgtggtggctcatgcctgtaatcccagcgctttggaaggctgaagcaggtggattgcttgagaccaggagtttgagaccagcctggtcaacacagagaaaccccatctatactaaaaatacaaaaatcagcctggtgcggtggcacacccattagtcctagctactcaggaggctgaagcataagaattgtgtgaacccaggaggcggaggttgcagtgagccaagattgggcccctccattccagcctgagagacacagcaacactcttgtcttgataaataaataaataaataaataactgtccaggtgtggtggtacagccctgtagtcggagctaatcaagaggctgaggtgggaggatcgcttgagcccaggatatggaggctgcggtgagctatgatctcaccactgcactccagcttaggggacagggcaagtctgtctcaaaaaaaaaaaaaaagcaattgaatacactgatattttgccaggaccctgccttctacaggcatctagtctaatgggactgggagtaatcaggggagatgacctaatcccaatgtcacattataataggatgtaactggagagctacgggcatgcagaagttggaagacgagggaaggcatcacagaggctgtggggtgaaccgacttcaaggaatgggtccttcccttcagaaccacatgtgtgcgggacacccagacagaaaacacaaatgcaaagtcaagtggagggcatttggaaggagcagtgaagccaagccaggaaacaccaagatggcgagccagtgtggttgtagagattgtagagagggtggaattggcactgtggaccctggcctcgatagagaaagacatcagctaaggaagttgttcaggtgggcagtgaggttgtcgtgctttggaaagatgttcaggctgcactaggaagccccctggcttggggagagactccaggaaaccccagcagggagcatttgacagtggattcgagtgatgcaagggggacctggactgtgacctctgtcacgggaacccggaggaggctgatggcttttgcggttgatgtgggaaggagagagaacaaccggaaacgtctgcttgctgggggaagtgtcatgtccgctcctccgctccttttcttctccccttaggagcggttcatggttccttttgttttttgttctttttttttttttttttttgagactataatcctgtcttttttgtacacagagtaaagaggacaaataggtgaaagaataaatgaaaggctggaatcccacttcccccgctgtcccagggcattggatattgacggataggaggcagcaaaccactcacagagccaggaagaaatgaatgcgttggtattgccaggaggggaggccggcccggctgaaatacgctatgaccatagccaggagatactgatggagagaaaggaacacagagagggagaggtcacatcttgggagaggaagattgtggatatagtggaatgggggtctggggaggggttgcccatcagagaagggacctcagtgttggggtgactgtgctcatgtggaaattgcggggtggaggggtattcgaaggtcggatgcaaatccgagaagccggaggaagggtttttggtgatgctcccaggatggtgggctccgatgggatctttggagggggtgtgtctaggtcggctggtgtcaggagggtcttttgtgtgccaggcagagaactgtcccaaggagctgagagtagagggcccaggagcttcagggctgcagccagactgtggcccagggctcagatcccaaaggacccataggagaggcaggggccactcattcactctgcaagagaccagcagaatcctgacggagatgctgacaaatcataaaaagacaaagaatagccgggagtggcagctcaagcctgtgatcccagtactttttgagaggtggagacaggaggatcatgtgagcccaacagttggagaacaacctgggcaacacagcgagaccctgtttctaagaagatttcaaaaattagttgagcatggtagcatgtgcctagtcccagctcctcaggaggctaaggaaagaggattgcttgagcccaggaattagagtgagctatgatcatgccactgtactccatcctggggagcagagctggactctgtctcagaaaaaaaaatgtgtgggtgccaagactcaagaccatgggagctggtcagacacagtgctgacgtctgtaatctcagcactttgggaggccaaggcgggtggatcacctgaggtcaggtgttcgggaccaatctggccaacatggcaaaaccccgtctctactaaaaacacaaaaattagccaggcgtggtggttcatgtttgtaatcccagctgcttggaggctgaggtgggagaatcgcttgaacccaggaggcatcagctgcagtgagtcaagatcgagacactgccctccagcctgggcagcagagcaagactgtgtctcacaaaaaaaaacaaaaacaaaaacaaaaaaaaactgtaggagcatctggtgggaggtggtggacggagaactgtgggtttggaagctgcgccctccccctggccgtgcgttagaacaggaacacagttacatagagaacaaccttaccttgtccgacaccctcagatctttgtcccaggccaggagtcttttaatgacaggatcctctgtgattagagagcagatgtcagtgtgagaagcaggacagggtttccgtgagagcagcagggcagcgaggagaagtgtgcctcccgggggaaagtctcaggattgtggccgcgggtgaggtggatgagagaggggagaatgactttcactgggcaagggagagaggctcctgctctgagactcccctgagaagaggccgaaggaggccctgggtgtgagaatctacaggatgtagagctgggaatcagccaggaccccctccagcagacacggagggaccactgcagagtcataaaggaattcccatcatttcctcatgagacagtcacacatcagggtgtgaccatggccttgggatcccccactatggatggagacacttaggtttagcaaagtcagtaagaaacattaagtttcagagggcacagctgaaaccacttttttgatttttgattttgtttttctttatttgatttttatttttatttatttattaatttattttgagacagagtcttgctctgtgggccaggctggaatgcattggcctgatcttggctcactgcaacctctgcctcctgggtttaagcagttctcctgtctcagcctcccgagtagctggaactacagggatgagctactgtgcccagccttggtttttcttttgacgcagagttttgctctgtcacccaggctggagtgcagtggtgcagtcatagctcactgcagcctcaaagtcctgagttcaagcaatcctcttgcctcagcctcccaacgtgctgggatctcaggcgggagccacagcgcctggcccaaaaccaagctttcttatcccaagcaccgacctttatcaagtctacctaatcctctgttgtctccttaagtgtccctcatgagtgatcacttcagagtcctcccgcatggagagctcacccactggggcatatttttcccattggaaaagtgtggttattggaagtttcctctttagaaagaacaggattggaggtgctctctggggtgtcctcctaccaagcagcctgttgaaggcctcgtagtactcagggagcacgagcgacactcgccgtcgcttcgccttcatcttgaggccacacagcgtctccgccacccaggtctcctcaggctcaggggcgagctccttctctggctcatcatcagattcatccaaacattccctcttccttttccagccaagggacctacgtggggggctgggatctaccccaggggctgagtaaagaaaccaggccaccgtgtaatgcttctgcaactgatcacgttagaccccgaccccaaaccccaaaccactctccatcctccccagcctcgcagactgctggcttctccaagccacctttctgactttctcctctgctcaaccccatgtgccactccttcccctccccattcttccctctctctgtcctcagaacactgcctcatatccttccctggtccctggctctctgagtccctctttttttttttttttttttgtttcgagacagaatcttgctttgtcacccaggctggagtgtagtggtgcaatctcagctcactgcaacatgcatctcccggattccagttattctcctgcctcagcctctcaggtagctgggattacaggtgcctgccataatgcccagctccattttgtacttttaatagagacagggtttcaccatgttggccaggctggtctcaaactcctggcctcaagtgatccgcctgccttggcttcccaaagtgctgggattacaagtgtgagccactgcacccagcctgaatttctccattcttcccacacaccctccccaggttctccttcctgacctctgacccttcttttttttcttcttttttttttttttttttttttttttttttttttgagatagcatctcactctgtcacccagactggagtgcagtagcacgatctcggctcactgcaacctcttcctcccaggctcaagtgattctcctgtcttagcctcccaagtagctgggattataggcacacaccactaccgcctggctaatttttgtacttttagtagagatggggtttcaccatgttggccaggctggtcttgaactcctgacctcaggtgatctgcccgcctcagcctcccaaagtgttggggttacaggggtgagccaccacgcctggcccccttccttcatcttagtcaatcctatgccacctcttcttcctccagtcccctcacctgatggtcccgacacttcatcatccaccacctcctggagggggtaccctgaggtgctccgctgggggctccgctcttcctggggctgcggttgatggctcatcatgatctttcccaaaatctgtcccatctcaccaaacctagtctctgttctgtccttggtcttcttctggacactgctgggatccagaagagtgtgttatcaattctcgaggctgggagaagtcaggagtggagaacagctctgagaagttactgttgtccaactgaactcccaggtgccgacagagtccggtccctccaatcaggaaggtcggaatctctgatgtcatcgctcatgccaacctggcaaccagtttgaaaaaaaacacatgtaactgccaggctgatctcttgtcctggagatcctgggtgaatggtatctcctgccactgtcccaacctcagaccactgtccaaaagcatcttcagggtctccgcatccctctgttccctgtcccagcagaggctgtgtcctctccactcaaagcttgaagcgtgttggggtctcctcttctctgtacatgcccgtttcagagtccagtctggtgggagagggatcaggatgggaaagaaaagtagggtaagcagaaacgatgaaaccttacaagagtgagattatcatgtacaagagatcccaggaacattgacttgatgaaaaagtcacatcagagcactcaatttggcagaggttttctgccgagtgtctactgacattcactgtccgagattctgtactgggggtacacgcgtcctctgccctaaggcatctttgagtccaagagatattttgaggactggaaatcataggaaactgcccatgagttcacacatatttccaatggtgtccccaatttcagggagtccacggatcacctaaagccagcccctccagtttggctaagaaactctatatatcaagttttgtatcatatgtattgctcttaactcagaaaattccaccatttatagcagtggtttatttatttataccattgaaggaaatggtttatttatgaatctatattatggatattctataagatactgggtgtacaaaaagactaagtcgaaaaatctcagctgtgcacagtggctcatgcttgtaatcccatctctttgggtggccaagggaggaagactgcctgaggccagcagttcaagaccagtataggcaacatagcaagagcccatctctaaaacaaaacaaaacaaaacaaaacaaaattagccaggtgtcgtggctggcacctgtgttccaacaacttgagagactgaggtggcaggaggattgcttgagcctaggagttaggggctgcagtgagctgtgatcgtgacaccgcactccagtctgggcaacacagcaagaccttgtgtcaaaaaaatttttttaattaaatataaaagagtttcatgacattcagagaccatccaaagaacctgtgggttccggccaggcacagtggctcacgcctgtaatcccagcgctttgggaggccatagcaggtggatcgcttgaggtcaggagtttaagagcagcctggccaacatggtgaaaccccatctcttctaaaaatacaaaaaattagtcaggcatggtggtgggtgcctgtaatcccagccactcaggaggcggggacagcagaatggcttaaacttgggaggcggaggttgcagtgagccaaggtcacaccattgcactccagcctgggcaacaagagcaaaactacatctcaaaaaaaaaaaaaaaacaaaaaaaacaaaaagaacctgtggatgagttcccacatggcttcctaacgggctgcggctctcctaggagtctctcgctcatgggaaaggcacaaactgaatgcggaaggaaatcccattgctgtggaagtcccattgttaggaagctctgcttttctggagttcaaatttgcattcatgacgctttaaaccgtcagagctgggtgtgtcctcctacaacaaatcactttactctctctcctggttaacaggctttcaaatattagaacatccatgttctgacctcattaaaattgctcttttgtggaatgaaaagctctgatttaacccgtctttaagcctggtatgcatattcctctctgttccggccaccttgtctagacacactacactgaggcagtgcccatcttagatgatgttgatacattgtcaaaaaatgggcaaaccaggtgcggcggctcacacttgtaatcccagcacttttggaagctgatgccgacagataaccagaggtgaggaggttgagatcagcctggccaacatggtgaaacctgtctgtttttctgtaaaaatacagaaacaatgagctgggcgtgggagtgcacttctgtaatcccagctacttgtggggctgaggcaggagaatcacttgaaccgggaaggtggaggttccagtgagccgagatcacgacactacactccagcctgggcgacagagtgagactccgactcaaaaaaaaaaaaaaaaaaagtgccagacagcccaggtttggtctgatatgttcagaaaaaagcaaaacagtcacctctcaccttttcttttcctgcaatgatgccgtttaatacaacaatggctgtaggtctgcggcagaaatatcattcaagtgaaacagaagggctttcctggctggacacagtggtcactcctgcaatcccaacactttggttggctaaggtgggaggatttcttgcggccaggagttcgaggctgcagtgagctgtgatccaccactgcattccaggctgggcatcagagtgaggcctgtctctaaaaaaacccttcactccccaaaaaaagggattttcaaataccagcctttcagcatgaggatcacatggaggaacattaagacacagatgctgggacccagccctattgattgtaattaaaaaactgaggtgaggcctgatttagctccatcattggaatccattcagatttgaaattctctgagttggacagtgcaagagagatcctaaagaaagcaaagtcactgtggactgaaatgagctggcaaggttttctgagcgtggtgaaatatgatctgggcctcgcttgggagggctgtggccaggccttgagtccgtggctcagtgggaccttctgaaacagcctccaatccgtgcccccacttcatttgctagtggatgaccccctccagcggctttggtgctgatgggaataagtcaacctgcagcggaagttcagcccaagtttcagcccagcagcttctacacacctgtccgtggtctggtcatgctgccatctctgcggttctctgcggttctctgcggagtcgtggtttctgtaccttgaagagaacttcccctctgggacccagaaacccagtgaatcctcaggaaaaaagggaatgaaattactgaagacaactctgtggcggggagatggaaaagaggctctctctctttttttttcctaatattttgagacagagtttcgctcttgtcacccaggctgcagtgcagtggctccatctcggctcactgcaacctctgcctcccaggttcaagcgattctcctgcctcagcctcccgagtagctgagattacaggcacccaccaccactcccggctaatttttgtattttagggtttcgtcatgtttgccaggctggtcttgaacacctgacttcaaatgatccacccgcctctgcctctcaaagtgctgggaatacaggcataagacactgcacccggcctgtttttgttttttagagacaaggtctctgttgccttggctggggtgcagtggtacaatcagctctctgttgcctcggctggggtgcagtggtacaatcagctctctgttgcctcctgggctcaagcaatcctcttctctcagcctcccaagtagctgagactacaggtgcatgcctgtagtagatatagcatcttgctctgttgcccagactggtcttgaactcttggtcacaagcgatcctcttgccttggcctctcaaagtgctggaattacacgcgtgagccattgagcccaaccagataagatgatctttaagggcccttcccatggcaccataatccaagtcagcgagactgtggctatagcaagtttaacataaccagatacgctagtattatgggctgcatggtgtgccccccacccctaattcatgtattgaagccatgaccctccagaccttagaggtgaccttattggaaccagagtctttacagaggtgatcaagttaaaatgaggtcactagaggccaggcactgtggctcacacctgtaatcccagcacttcgggaggccgaggcaggcagataatgagcccaagagaccgagaccatgatgtccaacatggtgaaaccctgtctctactaaaaatacaaaaattagccaggcgtggtggtgtgggcctgtagtcccagctactcaggaggctgaggcaagagaatcgcttgaacccggaaggcagagattgcagtcagccaagatcatgccactacactccagcctgggtgacagagtgagactctatctcaaaaaaataaaaattaaaaaactaaaaacctacagtaccgccttttacataatgcaatggtttggtaagcacatgcaccccagggaggtagtggcagattcagtcaaccttcccagcagcgtggagacgcagtcaggcatagcaggtgttgatgtggtttgaacccacagcttggctcaaatccacactcccctacttagtaccgagtgaagccacttaccctctaagtgccttacttttcttttcttttcttttttcttttttcgagacagagtctcgctctgtcacccaggctggagtgcagtggcatgatcttggctcactgcaaacttcgccttccaggttcaagcaattctcctgcctcagccttccaagtagctgggattacaggcgcccaccaccatgccgggctaatatttgtatttttgatagagatggggtttcaccatattgcccaggctggtctcgaactcctgacctcaagtgatctgtctgcctcggcctcccaaagtactaggattagaggcatgagccaccacacctggccacttttcttatctatatttgttatgtggatgacttgtgttaacgcaaataagatgctgctcgtcatctttaaagaaaataggtggcaacctgttatagcaagtcctgtttttatttgtacttatgaggctttaattaaacgctaagaattaaaatgcacataataatagactttacctcacaaactggcttcaaatattcgatgagacttacatgtattacttaaatgaggttaaatttaaccttttaaaaatgatttattgtggctgggcacagtggctcacacctgtaatcccagcactttgggaggccaaggcagacggatcacttgaggccaggagttgaagaccagcctgaccaacacggcaaaaccccatctccgctaaaaatacaaaaattagccaggcatggtggtgcacacctgtaatcctagctactcaggaggctgagacacaagaatcgcttgaacccgggaggcagaggttgcaaggaggtgagatcacaccactgcactccagcctgggcaatagagtgaggctctgccttaaaacaaagaaaaatgattttgggggatgatggggtgtcactgtgttgaccaggcttgtctcaaactccttgcctcaagcaatccacccacctcagcctcccaagtagctggaactacaggcgcatgccaccacgcctggctaatgtgtgtgtgtgtgtgtgtgtgtgtgtgtgtgtgtgtagaaacaaggtcttactgtgttgtttaagctgctctcaaactcctgggctcaagtgatcctcccacctcggcctcccaaagcattggaattacaggtgtgagccacctcactgagccctccacctttcagctgaacgcagaaaagtacaatcttttaacccaaagcgttcctcacacttagggtcaggaagagcccttcatgccctggaggcaactactaaccctctgctaaacactctgactctgggtgtgagaaacacacctactgtgccccacatatttttccaaatacaacttaatttagccttcacgacaaccctggagtgaaggatcattaactttatttcatagatgtggaaactgagactcagaggcaggaaatgacctccttctggaggctgcaaattctttgatgctcctttgatcaacaggtgggagctggccagaggtggtggctcacacctataatcccagcactttgggaggccaaggtgggaggattgactgaggccaggagtttgaaactagcctgggcaacatagcaagacctcatctctacaaaaaatacacaaattagcagggtgtggtggtgcacacctgtagtcgcagccactcgggaggctgaagtggtagcattgcttgagcccaggaggttgaggctggagtgagccatgatcaagccactgcactccagccgaggagatggagatagaccctgtctcaaacaacaacaaaaaaataggtgaggatcagccaggcatggtggctcacgcctgtaatcctagaactttgggaggccaaggtgggaggattgcttgaggccaggacttcaagaccagcctgggcagcctagcaagatcccatcccttaaaaaaaagtttttaggctgggcatggtcactcatgcctgtaatcctagcactttgggaggccaaggcaggcgggttgcctgagctgaggagtttgagaccagcctgggcaacatggtgaaatcctgtctctactaaaatacaaaaaattagccaggtgtggtgttgggcacctgtaatcccaggtactcaggaggctgaggcaggagaattgcttgaacccaggaggcagaggttgcagtgagccgagagcgcaccactccactccagcctggacaacagagcgagactccgtctcaacaaaaaaatgtttttaattagccagctgtgatgatgcatgcccatgtcccagctacttgggaggctgaagcaggaggattgcttgagcctgggaggtcaaggctgcagtgagctatgattgcgcccctgcactccagcctggacagcggagggagaccctgtctgaaaataaaaaaagaggtgggggcctatgaccccccctttaattttggcccaaccttagtaacaggatagtcattgagtagggcaaaagtgatgttatgatgtttttcagcctccaatttacagtctaaaacatgtcttgggtaaacacagcaagactccatctcaaaaaaaaaaaaagaaaaaaaatcagaagtgaacctgtagcctgtagtgtgttgccaaataaacttatttttagagatacttctttccattttctgtgaggtcatctgcagtttcacatggtagacagacttaggtgagattcttagcaacatagaatgaagagtaaagaggtttgtttatttcacaagggtttattgaaggcctacgatgtgttaaatgctgtaggaaatacccactgatttctcttttcatggaggtttcccgccttctcttaatgagtgatcaattaaactgtttactgggaacttgctaagttaatgaacacacgggatacattctttggatgagcagacattggttgggcagaggggcaagaggagagcagtttagacagagacctgcttatacactgtagtgtctaagagagcttgtgatgttcaggaaacagttgttcactgtgctgcaatataggggacggccagttgcggtggctcacacctgtaatcctagtgctttggaaggccaaggcgggcagatcacctgaggtcaggagttagaaaccagcctggccaacatggtgaaaccccatctctactaaaaacacaaaaattagctgagtgtaatggtggatgcctataatcccagcaacttgggaggctgagacaggagaatcacttgaacttgggaggtggaggttgcagtgagccgagatcatgccattgcactctagcccaggtgacagggtgagactctgtctcaaataataataataataataataataataataataataataataataataataataatgtaggggacttgatgaagggaaaggatcagagagattctgaaaagaaggtagtttggggcccagtgatgactagattttaagtttcatatagtaggaagtggggcactagtaatttttcaagcagaaaaattatttgaccagattcgtgatttcaaaaatagctctggtgatagagtggaggatgggttggagcagggaataaggggaaatgaaaccgttataaaactcttaaagtgggctgggcatggtggctcacgcctgtaatcccagcactttgggaggctgaggcgggcggatcacgaagtcaggagatcgagaccatcctggctaaaacggtggaaccctgtctctactaaaaatacaaaaaattagctgggcatggtggtgggcgcctgtagtcccagccactcaggaggctgaggcaggagaatggtgtgaacccgggaggcagagcttgcagtgagctaagatcgtgccactgcactccagcctgggcgacagggcgacagagcaagaatccgtctcaaaaaaaaaaaaaaaaaaaaaaaaaaaacctcttaaaacaagtacagcaagaactttgagggtctttgctaagacagcagctggcagcttcaatttggagtagggtatcaaaggcaactgtgtataaggaatagttatataactggtatccaatttctgagatgattttgacttaaacattgtgtatttcccagcatactgttggtttttctaattatgtgggaaattatgttgcttttacttttttttttgctcattgcccagcctagggtgcaatgctgcaatctcagctcactgcaacctccgcctcccaggtttaagtgattcttctgcctcagcctcccaagtagctgggattacaggcgcccaccaccatgcctggctaattttttgtatttttggtagagacagggtttcacgacgttggccaggctggtctcaaactcctgatctcaagtgatccacctgcctctgtgtcccaaattgctgggattacaggcatgagccaccgcaccggccatgctttcagttttcaagaaagaagacaccattattgccaaagattttggtaatttgagagatacaatgtatgttttctccatgtggatactagatagtaaggatgtgttgaatttgaagtgtctatccagaagtattttgggtacttgtttaaggattgtaaaacaatgtttccatttctggatataataaatgtatttgttaatataataaatgaatagattagacccataaactatttgcagtgttgagtcatttcccacagttaaaatcaggatgaaaatatatagctgaatacttgctttgtttcttgtaactgatttctttagtacagaacctgctaaggccatcaaacctattgatcggaagtcagtccatcagatttgctctgggccggtggtactgagtctaagcactgcggtgaagaagatagtaggaaacagtctggatgctggtgccactaatattggtaagtttgggagagttttaagccacaagaaatgatcagtgaatgttgttgtagtcaagaaacatttgttattgaaataagactatcaagtgttgatgtagtaataaactattatttttaagttaaagttagcacctattatgtgcctagtacttagctaggtagtaataataataacgacagcttttcttgtgttcttatggtgtgccaggcaggtgttatgctaagaattgcacagaaatatctcatttaatttgcagaatagctgggcgtggtgtctgacgcctgtaatcctagccctttgagaggctgaggtggggggattgcttgaagccaagagttcaagaccaacctggccaacatggggagacctcgtctctattaaaaaataaagcaggccgggtgtggtggctcacgcctgtaatcccagcactttgggaggccaaggcgggtggatacctgaggtcaggaattcgagaccagcctgtccaaaatggtgaaactctgtctctactaaaaatacaaaaattagccagacctggtggcagaagcctgtaatcccagctactggggaggctcaggaatgagaattgtttaaatttgggaggtggaggttgcagtgaaccgagatggtgccactgcacgccagcctggggacagagcaagactctgtctcaaaaaaataaaataaaataaaataaaataaatcctggagtagtggctcacatctgtaatcccagcactttgggaggctgaggggggctgatgctttgaggtcaggagttcaagaccagcctaaccaacgtggtaaaaccctgtctctactaaaaatacaaaaattagccagatgtgatggtgcatggctgtaatctcagctcctcagaaggctgagggaggagaattgcttaaacctgggaggtggaggttgcagtgagccaagatcgattgtgccactgcattccagcctgggtgacaagagcaaaagtccatctcaaaaaattaaaaaaaaaaaaaaaaaaaggaaagaaaaaaaagaaaatgacaaaattaaaaaaaaattattaatctgccaaataactttatgagatagaacttattacctccattttacagttgaggaaattaagggacagtaaatttcctttttttgagattataaagctaataaaatagaatctaggaagtctgattccagaaccagttctgtttttttttcttttttttttttttgagatagagttttgctcttgttgccgaggctgcggtgcaatggcacgatctcaactcactgcaacctccacctcccaggttcaagcgattctcctgcctcagcctcacaagtagctgggattacaggcatgcaccaccacgcctggctaattttgtatttttagtagagatagagtttctctacgttggtcaggctggtctcgaactactgacctcaggtgatccgctcgctttggtctcccaaagtgctgggattacaggcatgaaccactgcgcccggcccccgttctccttactgggtatgttaaaattatttctttcaaaggaaaaggctggtcaaagtgcaacggtctttacaactaattgatcacaaccagttacagatttttttgttccttctccactccaactgcttcacttgactagtgtaaggaaaaaaaaaagaggaaagaaagaaaatgctaaactatttaatctgggctagtaaatggccagaaagaactttataaaaatgaaatatacaaaatgacactagtatgtttaactaaaggtatagttacgacacttaaatttgcacgttataaataatatcaatataaaaactgatagcgtgggtccatttttaataaatatataaatattttaaactttctagatctaaagcttaaggactatggaatggatctcattgaagtttcaggcaatggatgtggggtagaagaagaaaacttcgaaggcttaagtaagttaactttctaatcctattacaaaataattgggccacatgtcttagaattttgagtaacactgtcttgggaaacacaaaaacagttttttaaagccagttactagatatcatgtatatttgttgttatagcacttgagatatcttagtccttactttacagtctctttcagctctgaaacatcacacatctaagattcaagagtttgccgacctaactcgggttgaaacttttggctttcgggggaaagctctgagctcactttgtgcactgaggtgagaaaatatttttatccattcacttgaccccttagaaaaacctctctgaaaattaattggaatcattattatttacaattttctatctcaatatctcagcttctagcttctgaattctgttttgtctcactgccaatctaagtcctagtacttctgaaatgtgagcaataaatgaatgaaatgaagcaaatagtattgtttaaaaaattggttacccttattaaaacagtaacttctcaatttgaacataacatatagataataaatgatagttaccattggttttcattatcaatttttagggaaacatttcaccaaagcactatttaattacagcacagatactaaatttttataaataattacatgcacacacacatatatatacatatatatacatatatatacatatatatacatatatatacacatatatacacatatatacatatatatacatatatacatatatatacatatatacatatatacatatatatatacatatatacatatatacatatatatatacatatatacatatatacatatatatacatatatacatatatacatatatatacatatatacatatatatacatatatatatacatatatatgtatatatatatatatatttttttttttagacagagtcgcactctgtcacccaggctggagtgcagtggcacagtctcagctcactgcagtctctgcctcccaggttcaagtgactttcgtgactcagcctcctgaagagctgggactatagcgtgcaccaccactcctggctaatttttgtatttttagtagagatggggttttgccatgttgcccaggctggtctggaactccaggcctcaagtgatctgccctccttggcctcccaaagtgctggaattacaggcacgagccaccgcaccctgccctacatatacattttaattataatatcttttggattctttaaaaaaaattttaaaaattttaaaaaattctttaaaaaaattcttttaaaaaattttgtttgaagagtaataacaaaacaaatctctatttgagaatcaataaatcttgagatcatttatggttttgcaattcaacctgaaaaatgaagtcaaagcttttatcaaaacaaagcatgtttagtgctctctgtctcactgtcttttagatgccagaccttagattttgtgatgactcctcaaccgtttagatctcggttatctcagagggatcatcagctttttaagaaaattttgagagaaaagcaagtgaagaaaagagtagtcagtgcccaacatcatggatctctcactgaacacaccatgcctggtattctctcacagtgatgtcaccatttctacctgccacgtatcggcgaaggttgggactcgactggtgtttgatcacgatgggaaaatcatccagaaaaccccctacccccaccccagagggaccacagtcagcgtgaagcagttattttctacgctacctgtgcgccataaggaatttcaaaggaatattaagaaggtacagtaaattaatcctggttttcaagagtattggttaatgcacgtgagcaaaagatttactaaagatgtttattcttcagttgattctcttcccataatttattgagaaatgctttatttgcatttctcattaaagacttaacttcaggatgatttacttttttctttttatcacataatgtttattaggactgggaaacatagtgagactctgtctctatgaaaaattaaaaaaaaaattgactgggcatggtggcatgcacctgtagttccagctacttgggaggctgaagtgggaggatcacctgagcccaggaacttgagactgcagtgagctatgattgcgtcactacacttcagactgtgagacagagtaagaccctgtctggaaaaatatatatacatatatatacattttttttattttttatttttatctttttttgagatggagtctcactttggcgccctggctgcagtgcagtggcgcgatctcagttcactgcaacctccacctgccaagttcaagcgattctcctgcttcagccttctgagtagctaccattacaggcgcgcgccaccacgcccggctaatttttgtattttcagtggagacggggttccaccatgttgtccaggctggccaggctggtcttgaattcctgccctcaggtgatccgcccacctcggcctctcaaagtgctgggattacaggcgtgagccaccatgcctgaccttatgtacttatatttttatgagaatatttctcttggttttctgataaatgagttactggaacccttatgaatttgaatgcaaatgaaacagctaaatgttatataattgttgtgtttaaaaagcagattataaaactgtctgtattatatgattacagttttataaaaacaaaacaggcctaaatgtgtatagtataaagactgaagagtcagcacttccatgttctcagcggttatccttggatgtgagatctcatgcactttttgctctcttctttgtgcctttccattttgcatgcgtatttcttataatctaaaaagttacttaaacatatgcagctaaaaactttttttacttgtaaagcgtttggtgctaattttaacttttttttttagacggagtcttctcactctgtcgcccaggctggagtgcagtggtgtgatcttggctcactgcaacctccgcctcctgggttcaagtgattctcctacctcagcctcccaagtagctgggattataggtgtgtgtcaccacacccagctaatttttgtatttttagtagagatggggtttcaccatgttggccaggctggtcttgcacccctgacctcaagtgatctgcccacctcagcctcccaaagtgctgggattacaggcgtgagccaccacgcctggcttttttttttaaagcttttttgtaagtcagccagcaagaacacaggaggaagtactcaaatctcccttacacagctgggggctgtgtcaggttttataagcatagggtaatgaggtgtgatttgattggatcttgcaataaagtaatgctgggaggtgtgatctgactggatcctgccatggggtgacaccaaaactcaatctgattggatcctggctcctgcctgggggtgtctggttcttaaatcggtccgagctcttcaggctgagctcttaggttccactccacggtggcacgcgtggttaacctgggcatgcacagggtacatgaccttcaacctgcaggtcgatggcaattggaaaacaactgacaacttcattacataaaagttgaactgattcgggtgcggtgactcacgcctgtaatcccagcactttgggaggccaaggcaggtggatcacctgaggtcgaggagttcaagaccagcctggccaaaatggtgaaaccccgtctctactaaaaatataaatattagccaggcgtggtggcgcacccttgtaatcccagctaccccagaggctgaggcagcagaatgcttgaacctaggacgtggaggttgcagtgagctgagatcgtgccattgcactccagcctgggtgacaagagtgaaactccatcaaaaaaaaaaaaagttgaactagatttggtctgatgcagttacagatttacaaaccgcgtcccaccctcctgccaacaccttccactcctcattcttgagggattagggatggaggtcatgcttctgtatcgacttcatgctgaccaggggcacttagtcccctaaagtgagaggaatgaaactcttgggcttctgagttcagatgagttctggggtcacccggagtagcttgaaaggctggtattgttgtaatacaagctgaaggtggaagtgttggatcctggaggacaaacagctcaccatccatttaaataaataggaccaaaaagtaacagaacagtggccacgaggggccccaacagaggaagaaaccaggtgaggtgtggtatagtggactcgactgccttctaaatctcagtggttgtccgggtgcggtggctcacgcctgtaattccagcaaaagaagagccgaggcagggtgatcacgaggtcaggagttcaagaccagccgggcaaacatggtgaaaccccgtctctactgaaaatacaaaaattagccaggtgtggtggcgtgtgctgtagtcccagctactagggaggctgaggcaggagaattgcttgaacctgggaggcggaggttgcagtgagccgagattgtgccactgcactccagcctaggtaacagagcaggaccccatctcagtcaatcaatcaatctcagtggttgaactacccttgatatggttcagctctgtatccccaaccaaatctcatgtccaattgcaattcccagtgttgagggagggacctggtgggagatgattggctcatggcggctgacgtcccccttgctggtctcgtgatagtgagtgagcgctcatgggatctggttgtttagaagcatgcagcacctcctgcttcactctctctgtctctcctgctccaccatggccagaaacgtgcctgcttccccttcgccttctgccgtgattgtcagtttcttgagggctccccagccatgcttcctgtacagcctgcaaaactgtgagtcaattaaacctcttttcttcataaattccccagtttccagtagttctttatagcagtgtgaaaacagactaatggacccttctggttgaaggaatgtagccattctgcttgtttaagtatttcctttctattcatctctatttcccgggaggtgtttatccaagtgcaataggagatattggtgactgcagagtcccctcagtgttctgctagtaaatagttgaaggttgatcagtgatctccagcattttcagtctggcatggaaaagcccccatgtaactggtaaaggtatcagtaagcaccaggaggtatctaaatccaccaggagccataggcatcatgttgatgtccatttaccagtcttccctggcaagattctctgaattgtactgccttggccaaaagaggtatgggaggggctgggcacagtggctcacgcctgtaatcccagcattttgggagaccaattcgggtagatcattagaggtcaggggttcaagaccatcctggccaacatggtgacattccatctctactaaaaatacaaaaagtcagcggggtttggtgttgggtgcctgtaatcccagctactcgggaggctgaggcaggataatcacttgaacctgggaggaggaggaggtggcagtgagctgagatctcgccattgcactccagcctgggcaacaagagcgaaacttcatctc

SEQ ID NO: 1811 - DNA, 24218 bp, Homo sapiens
caggaggcggggcgcctgtgggagccgtggagggcactttcccagtccccgaggcggatccggtgttgcatccttggagagagctgagagctggaggtgagctgggctcgcggtcgcccctctcgcgcgccctctttgagaaccacggcttccaacctccctggaaatggggggaacatggccgaggcgcgtggcgaggtcacctcgtggaggccccggagcggcatcctcagcgccccagcgatccggtgcccattaggtgcgccttgaagccgaggcaagctccttcggggtgctgggctgcgggcaaagaattcggccctgtgaagagttgggttcggcctgtctcaggccctgcccacatcccatcacagggccgtggacttgaagccggaacgtgaaatccccatagactgaatgcatttcctttctacctgttctccctccccttttatttttatttttatattattttatttttaatttttattttatttttttgtagagacggggatttcgctatgttgcccaagctggtctggaactccggagctcaagcagtccgcccgccttggccccccaaagcgctggaattacaggcgtaatgcactgtgcctggccttttaaaaaaaaattgaggttattttggggacagtagagcatccagacatatcctaatttgcgtagctgctcagttttaaaaaatgcaatgcatttttacctgttagggtatgtgatttctggctggtaagctacaccgaatcttggctagcacagttgaattccatgtcagatttgtaaacgcaaatttgctctctgcatttaaatatattagatatatttaggtaactacatttaaatgtattgagacatttaaataaatttgccgtctgtatctaaatatctgaagtggaccaggtgcggtggctcacacctataatcccatcactttgggaggccaaggcaagtggatcatgaggtcaggagttcacgaccagcctggccaacatggtgaaatcccatttctactaaaaatacaaaaattagctgggcgtggtggcaggcgcctgtaatcctagctacttgggaggctgaggcaggagaatcgctggaacccaggagacagagattgcagtgagctgagattgcaccactgcagtctagcctgggtgacacagcaagactccatctcaaaaaaaaaaagaaaaaaaatcagaagtgaacctgtagcctgtagtgtgttgccaaataaacttatttttagagatacttctttccattttctgtgaggtcatctgcagtttcacatggtagacagacttaggtgagattcttagcaacatagaatgaagagtaaagaggtttgtttatttcacaagggtttattgaaggcctacgatgtgttaaatgctgtaggaaatacccactgatttctcttttcatggaggtttcccgccttctcttaacgagtgatcaattaaactgtttactgggaacttgctaagttaatgaacacacgggatacattctttggatgagcagacattggttgggcagaggggcaagaggagagcagtttagacagagacctgcttatacactgtagtgtctaagagagcttgtgatgttcaggaaacagttgttcactgtgctgcaatataggggacggccagttgcggtggctcacacctgtaatcctagtgctttggaaggccaaggcgggcagatcacctgaggtcaggagttagaaaccagcctggccaacatggtgaaaccccatctctactaaaaacacaaaaattagctgagtgtaatggtggatgcctataatcccagcaacttgggaggctgagacaggagaatcacttgaacttgggaggtggaggttgcagtgagccgagatcatgccattgcactctagcccaggtgacagggtgagactctgtctcaaataataataataataataataataataataataataataataatgtaggggacttgatgaagggaaaggatcggagagattctgaaaagaaggtagtttggggcccagtgatgactagattttaagtttcatatagtaggaagtggggcactagtaatttttcaagcagaaaaattatttgaccagattcgtgatttcaaaaatagctctggtgatagagtggaggatgggttggagcagggaataaggggaaatgaaaccgttataaaactcttaaagtgggctgggcgtggtggctcacgcctgtaatcccagcactttgggaggctgaggcgggcggatcacgaagtcaggagatcgagaccatcctggctaaaacggtgaaaccctgtctctacaaaaaatacaaaaaattagctgggcatggtggtgggcgcctgtagtcccagccactcaggaggctgaggcaggagaatggtgtgaacccgggaggcagagcttgcagtgagctaagatcgtgccactgcactccagcctgggcgacagggcgacagagcaagaatccgtctcaaaaaaacaaaaacaaaaaaaaaaaaactcttaaaacaagtacagcaagaactttgagggtctttgctaagacagcagctggcagcttcaatttggagtagggtatcaaaggcaactgtgtataaggaatagttatataactggtatccaatttctgagatgattttgacttaaacattgtgtatttcccagcatactgttggtttttctaattatgtgggaaattatgttgcttttacttttttttttgctcattgcccagcctagcgtgcaatgctgcaatctcagctcactgcaacctccgcctcccaggtttaagtgattcttctgcctcagcctcccaaatagctgggattacaggcgcccaccaccatgcctggctaattttttgtatttttggtagagacagggtttcacgacgttggccaggctggtctcaaactcctgatctcaagtgatccgcctgcctctgtgtcccaaattgctgggattacaggcatgagccaccacaccggccatgctttcagttttcaagaaagaagacaccattattgccaaagattttggtaatttgagagatacaatgtatgttttctccatgtggatactagatagtaaggatgtgttgaatttgaagtgtctatccagaagtattttgggtacttgtttaaggattgtaaaacaatgtttccatttctggatataataaatgtatttgttaatataataaatgaatagattagaaccataaactatttgcagtgttgagtcatttcccacagttaaaatcaggatgaaaatatatagctgaatacttgctttgtttcttgtaactgatttctttagtacagaacctgctaaggccatcaaacctattgatcggaagtcagtccatcagatttgctctgggcaggtggtactgagtctaagcactgcggtgaagaagatagtagaaaacagtctggatgctggtgccactaatattggtaagtttgggagagttttaagccacaagaaatgatcagtgaatgttgttgtagtcaagaaacatttgttattgaaataagactatcaagtgttgatgtagtaataaactattatttttaagttaaagttagcacctattatgtgcctagtacttagctaggtagtaataataataacgacagcttttcttgtgttcttatggtgtgccaggcaggtgttatgctaagaattgcacagaaatatctcatttaatttgcagaatagctgggcgtggtgtctgacgcctgtaatcctagccctttgagaggctgaggtggggggattgcttgaagccaagagttcaagaccaacctggccaacatggggagacctcgtctctattaaaaaataaagcaggccgggtgtggtggctcacgcctgtaatcccagcactttgggaggccaaggcgggtggatacctgaggtcaggaattcgagaccagcctgtccaaaatggtgaaactctgtctctactaaaaatacaaaaattagccagacctggtggcagaagcctgtaatcccagctactggggaggctcaggaatgagaattgtttaaatttgggaggtggaggttgcagtgaaccgagattgtgccactgcacgccagcctggggacagagcaagactctgtctcaaaaaaataaaataaaataaaataaaataaatcctggagtagtggctcacatctgtaatcccagcactttgggaggctgaggggggctgatgctttgaggtccggagttcaagaccagcctaaccaacgtggtaaaaccctgtctctactaaaaatacaaaaattagccagatgtgatggtgcatggccgtaatctcagctcctcagaaggctgagggaggagaattgcttaaacctgggaggtggaggttgcagtgagccaagatcgattgtgccactgcattccagcctgggtgacaagagcaaaagtccatctcaaaaaattaaaaaaaaaaaaaaaaggaaagaaaaaaaagaaaatgacaaaattaaaaaaaaaattattaatctgccaaataactttatgagatagaacttattacctccattttacagttgaggaaattaagggacagtaaatttcctttttttgagattataaagctaataaaatagaatctaggaagtctgattccagaaccagttctgtttttttttcttttttttttttttgagatagagttttgctcttgttgccgaggctgcggtgcaatggcacgatctcaactcactgcaacctccacctcccaggttcaagcgattctcctgcctcagcctcacaagtagctgggattacaggcatgcaccaccacgcctggctaattttgtatttttagtagagatagagtttctctacgttggtcaggctggtctcgaactactgacctcaggtgatccgctcgctttggtctcccaaagtgctgggattacaggcatgaaccactgtgcccggcccccgttctccttactgggtatgttaaaattatttctttcaaaggaaaaggctggtcaaagtgcaacggtctttacaactaattgatcacaaccagttacagatttttttgttccttctccactccaactgcttcacttgactagtgtaaggaaaaaaaaaaaaaaagaggaaagaaagaaaatgctaaactatttaatctgggctagtaaatggtcagaaagaactttataaaaatgaaatatacaaaatgacactagtatgtttaactaaaggtatagttacgacacttaaatttgcacgttataaataatatcaatataaaaactgatagcgtgggtccatttttaataaatatataaatattttaaactttctagatctaaagcttaaggactatggaatggatctcattgaagtttcaggcaatggatgtggggtagaagaagaaaactttaaaggcttaagtaagttaactttctaatcctattataaaataattgggccacatgtcttagaattttgagtaacactgtcttgggaaacacaaaaacagttttctaaagccagttactagatatcatgtatatttgttgttatagcacttgagatgtcttagtccttactttacagtctctttcagctctgaaacatcacacatctaagattcaagagtttgccgacctaactcgggttgaaacttttggctttcggggggaagctctgagctcactttgtgcactgaggtgataaaatatttttatccattcacttgaccccttagaaaaacctctctgaaaattaattggaatcattattatttacaattttctatctcaatatctcagcttctagcttctgaattctgttttgtctcactgccaatctaagtcctagtacttctgaaatgtgagcaataaatgaatgaaatgaagcaaatagtattgtttaaaaaattggttacccttattaaaacagtaacttctcaatttgaacagaacatatagataataaatgatagttaccattggttttcattatcaatttttagggaaacatttcaccaaagcactatttaattatagcacagatactaaatttttataaatgattacatgcacacacacacacacacatatatatatacatatatatatatatatatatatatttttttttttttttagacagagtcgcactctgtcacccaggctggagtgcagtggcacagtctcagctcactgcagtctctgcctcccaggttcaagtgactttcgtgactcagcctcctgaagagctgggactatagcgtgcaccaccactcctggctaatttttgtatttttagtagagatggggttttgccatgttgcccaggctggtctggaactccaggcctcaagtgatctgccctccttggcctcccaaagtgctggaattacaggcacgagccaccgcaccctgccctacatatacattttaattataatatcttttggattctttaaaaaaattttttaaaattttaaaaaattctttaaaaaaattcttttaaaaaattttgtttgaagagtaataacaaaacaaatctctatttgagaatcaataaatcttgagatcatttatggttttgcaattcaacctgaaaaatgaagtcaaagcttttatcaaaacaaagcatgtttagtgctctctgtctcactgtcttttagatgccagaccttagattttgtgatgactcctcaaccgtttagatctcggttatctcagagggatcatcagctttttaagaaaattttgagagaaaagcaagtgaagaaaagagtagtcagtgcccaacatcatggatctctcactgaacacaccatgcctggtattctctcacagtgatgtcaccatttctacctgccacgtatcggcgaaggttgggactcgactggtgtttgatcacgatgggaaaatcatccagaaaaccccctacccccaccccagagggaccacagtcagcgtgaagcagttattttctacgctacctgtgcgccataaggaatttcaaaggaatattaagaaggtacagtaaattaatcctggttttcaagagtattggttaatgcacatgagcaaaagatttactaaagatgtttattcttcagttgattctcttcccataatttattgagaaatgctttatttgcatttctcattaaagacttaacttcaggatgatttacttttttctttttatcacataatgtttattaggactgggaaacatagtgagactctgtctctatgaaaaattaaaaaaaaaaattgactgggcatggtggcatgcacctgtagttccagctacttgggaggctgaagtgggaggatcacctgagctcaggaacttgagactgcagtgagctatgattgcgtcactacacttcagactgtgagacagagtaagaccctgtctggaaaaatatatatacatatatatacattttttttattttttatttttatctttttttgagatggagtctcactttggcgccctggctgcagtgcagtggcgcgatctcagttcactgcaacctccacctgccaagttcaagcgattctcctgcttcagccttctgagtagctaccattacaggcgcgcgccaccacgcccggctaatttttgtattttcagtggagacggggttccaccatgttgtccaggctggccaggctggtcttgaattcctgccctcaggtgatccgcccacctcggcctctcaaagtgctgggattacaggcgtgagccaccatgcctgaccttatgtacttatatttttatgagaatatttctcttggttttctgataaatgagttactggaacccttatgaatttgaatgcaaatgaaacagctaaatgttatataattgttgtgtttaaaaagcagattataaaactgtctgtattatatgattacagttttataaaaacaaaacaggcctaaatgtgtatagtataaagactgaagagtcagcacttccatgttctcagcggttatccttggatgtgagatctcatgcactttttgctctcttctttgtgcctttccattttgcatgcgtatttcttataatctaaaaagttacttaaacatatgcagctaaaaactttttttacttgtaaagcgtttggtgctaattttaacttttttttttagacggagtcttctcactctgtcgcccaggctggagtgcagtggtgtgatcttggctcactgcaacctccgcctcctgggttcaagtgattctcctacctcagcctcccaagtagctgggattataggtgtgtgtcaccacacccagctaatttttgtatttttagtagagatggggtttcaccatgttggccaggctggtcttgcacccctgacctcaagtgatctgcccacctcagcctcccaaagtgctgggattacaggcgtgagccaccacgcctggcttttttttttaaagcttttttgtaagtcagccagcaagaacacaggaggaagtactcaaatctcccttacacagctgggggctgtgtcaggttttataagcatagggtaatgaggtgtgatttgattggatcttgcaataaagtaatgctgggaggtgtgatctgactggatcctgccatggggtgacaccaaaactcaatctgattggatcctggctcctgcctgggggtgtctggttcttaaatcggtccgagctcttcaggctgagctcttaggttccactccacggtggcacgcgtggttaacctgggcatgcacagggtacatgaccttcaacctgcaggtcgatggcaattggaaaacaactgacaacttcattacataaaagttgaactgattcgggtgcggtgactcacgcctgtaatcccagcactttgggaggccaaggcaggtggatcacctgaggtcgaggagttcaagaccagcctggccaaaatggtgaaaccccgtctctactaaaaatataaatattagccaggcgtggtggcgcacccttgtaatcccagctaccccagaggctgaggcagcagaatgcttgaacctaggacgtggaggttgcagtgagctgagatcgtgccattgcactccagcctgggtgacaagagtgaaactccatcaaaaaaaaaaaaagttgaactagatttggtctgatgcagttacagatttacaaaccgcgtcccaccctcctgccaacaccttccactcctcattcttgagggattagggatggaggtcatgcttctgtatcgacttcatgctgaccaggggcacttagtcccctaaagtgagaggaatgaaactcttgggcttctgagttcagatgagttctggggtcacccggagtagcttgaaaggctggtattgttgtaatacaagctgaaggtggaagtgttggatcctggaggacaaacagctcaccatccatttaaataaataggaccaaaaagtaacagaacagtggccacgaggggccccaacagaggaagaaaccaggtgaggtgtggtatagtggactcgactgccttctaaatctcagtggttgtccgggtgcggtggctcacgcctgtaattccagcaaaagaagagccgaggcagggtgatcacgaggtcaggagttcaagaccagccgggcaaacatggtgaaaccccgtctctactgaaaatacaaaaattagccaggtgtggtggcgtgtgctgtagtcccagctactagggaggctgaggcaggagaattgcttgaacctgggaggcggaggttgcagtgagccgagattgtgccactgcactccagcctaggtaacagagcaggaccccatctcagtcaatcaatcaatctcagtggttgaactacccttgatatggttcagctctgtatccccaaccaaatctcatgtccaattgcaattcccagtgttgagggagggacctggtgggagatgattggctcatggcggctgacgtcccccttgctggtctcgtgatagtgagtgagcgctcatgggatctggttgtttagaagcatgcagcacctcctgcttcactctctctgtctctcctgctccaccatggccagaaacgtgcctgcttccccttcgccttctgccgtgattgtcagtttcttgagggctccccagccatgcttcctgtacagcctgcaaaactgtgagtcaattaaacctcttttcttcataaattccccagtttccagtagttctttatagcagtgtgaaaacagactaatggacccttctggttgaaggaatgtagccattctgcttgtttaagtatttcctttctattcatctctatttcccgggaggtgtttatccaagtgcaataggagatattggtgactgcagagtcccctcagtgttctgctagtaaatagttgaaggttgatcagtgatctccagcattttcagtctggcatggaaaagcccccatgtaactggtaaaggtatcagtaagcaccaggaggtatctaaatccaccaggagccataggcatcatgttgatgtccatttaccagtcttccctggcaagattctctgaattgtactgccttggccaaaagaggtatgggaggggctgggcacagtggctcacgcctgtaatcccagcattttgggagaccaattcgggtagatcattagaggtcaggggttcaagaccatcctggccaacatggtgacattccatctctactaaaaatacaaaaagtcagcggggtttggtgttgggtgcctgtaatcccagctactcgggaggctgaggcaggataatcacttgaacctgggaggaggaggaggtggcagtgagctgagatctcgccattgcactccagcctgggcaacaagagcgaaacttcatctcaaaaaataaaacaagaagtctgggtgtggtggctcgtgcctgtaatcccaggactttgggaggccaagatgggtggatcatgaggtcaggagttcaagaccagcctggcctagatggtgaaaccctgtctcgagtaaaaatacaaatattagctgggcatggtggcacacacctgtaatctcagctactcagaagtctgagacagaagaattgccaaaacccgggagggagaggttgcagtgagccgagatcgcgccactgcactctagcctgggcgacagagcaagactccgtctcgaaagaaagaaagagaaaggaaattccccagggaagtacctcggcttatttcatgaagaggtactgaaggaagcagaggcatgtggaggacttccccacctcgtgcagctatttgggccgtggcgtctgaaatttcttatttcagagtcacccctttgatgaccttggcagtggactgcagtcatctgtttaggcctctccatggcccgtgtcaatgccgatatttctgtctgttgcacatttgatttccttgttgttggcatttagaaggccccctgtttcccagatcacaccacgggcatggaccgcagagattgcatcttgtgagtctgtagaaacagtcaaggccttgtcctctcttaggtccagagctcaggtgaatgcagattttcccggccatctgtgctgaagtccctgtggggaggctcctggctggtttcctgtaggtagacagctacacatcctgcccttcattggcttcttttcatgaagctcctgctgtctacaaaacatgtctcccttttcttcttgaaccacatctctgttattgaaactctagaagtcagccaggcacagtggctatgcctgtaatcccagcactttgggaggccaaggtgggtggatcacctgaggtcaggagttcaagaccagcctggcccacatggcgaaaccctgtctctaatacaaatactaaaattagccaagcatggtggccactgcactccagcctgggtgacagagcaagactctgtctcaaataaagaaagagaaagtatcatgcttttcagagttctgtgggttgttatggtgaattatcaaacctgaggacgtggtgggaacctccaaatttgcagccagttggtgagaagtacatgcggtctgtggacacccaagcttgcagctgcatctgaagcgagggcagcctagcgggggctggtggccttaacctgtggcatttgatgtaacatcagggagttgacatcagaattacgtcacacaggccaggtgcagtggctcatgcttataatcccagcaattagaaaggcaagataagaagattgcttgagcttgagtctgagcccacagtgagctatgaccgcaccactgcaccccagtctgggtgacagcacaagaccccgactccaaaaataaaaaagaaaaatcacaaagaattgcatggcagagtgcctgtctttcacagcttgaactgttgcaggaactttctttttttctttctttttttttttttttttttgtgatggagtctcgcgctttcacccaggctggagtgcagtggcgcgatctctgctcactgcaggctccgcctcctgggttcacaccattctcctgcctcagcctccggagtagctgggactacaggcgcctgccaccgcgcccagctaattttttgtatttttagcagagatggggtttcaccgtattagccaggatggtcttgatctcctgacctcatgatccgcccacctcagcctcccaaagtgctgggattacagtcctgagccaccgcgcctggactttttttttttttttttttttttgagaggggttggggagacatattctctgctagtgattctcctgcctggtctcgaactcctgctgggatcacaggcgtgagccaccacgcccagccacctttagagttttcttaccacctggttttcctctctcaatatctttctctcatttcctgctttaaaactctagcttggggtctgggcacagtagctcatgcctataatcccagcactttgggagactgaggcgggtggatcacttgaggtcaggagtttgagaccagcctggccaacatggtgaaaccttgtctctactatttttacaaaagttagtcagacgtacaggcggatgcctgtagtcccagctacttgggaggctgaggcaggagaatttgcttgaacgcggaggtgaaagttgcagggagccgaggttgtgccactgcactccagcctgggagacagagcgagactgtctccaaaacaaacaaacaaacaaaaaaaccctgtagcttgggatcagccttctcttctgttgtttttctttaaaaaataaaaattaaaaataggcttcaagtgatcctcccgccatgacctccaaaactgctgggattgtaggtgtgagcactgcacccagccgtatgtttttttctacataaaaaacagcacaggattatcttccaaagctaataaatatgttcaaataagcacaaccccattaaggaaaaatgtcacttgacagcaaataatcaatccagaccacaatatgatcacactcactgtgaaggtgagaaaagttcatctttattatgtttccccaagagatgcactgcactgttctcttgaaaacacacagctcatgtcctcctttagaacacacatcctctttaaagtaacatacaaacatgccaaaacaagataaaaaattccatctgaattctcacatttcaaacatacactaaatatcaaataaaaatttatttttacaagaatttaggggaactaccacatagctataaatgtaatatatatgttaactaagtatcatagataaaaaccatgctccccttcagcagcacgtgtaataatagatacaaagattgaaaggtaaaagatttaggatgaaaagaatcctctcttaaaaaggaaaacaaaattatatgtatgtgtatacaacagttataacacccatcacacagctttgtagaaacagcatctattcaaaaataccagtatttccaaaatatttaaaataatatttaaagtaataataatatttaaataaataaacatatttaataaatatttcaataaataaaataatatttaaataattctatacccatgtttttcaaaataaaccaataaaatagatagtatatattagacgtgttagtatatatatctgagacatgttaaaaatcacaactgaattctcacaattcagtcacaaacctaaacagcaaataaaaatttctatcaccagaattatgtttttttctggtggggaactaccaatagctataaatagaagagattattatggaagtatcatagataaaaagagtgctcgcttcaggagcacatataataatacagaaaaaaatttaaagataataaaagatttaggataaaaagaattctcacttaaaaatgaaaagaaaattatctttaggtatatataacaactataactctcatcaaaaaactctacaggaacagcatgttttcaaaagtacaacaatttccaaactatttgaaataaacctattaataattcaatggccaacattttccaaacaaaccaataaaatgcatagtgtgcatgaagctatctgttacagtctgtggcactcatatttcacaaagaattctgtgccaatctgagcccctgcactgtgccttcaaatgctcctggactgtggcaaccaagtccataagaaataggacctccaggttccgccccagggaggttggcattcagcaatataaaaagggaggtggtgccgcaggaaagggtggaactggaaacactcctggtttcttacttttctccaaggactcctagaagtaccccaccccacccctgctccttggaggacaacgtgatcactgtattcagctctgtcaagaatggtccaggttcttctagatgatctgcacaaatggttcctctcctccttcctgatgtctgccattagcattggaataaagttcctgctgaaaatccacatctcccctgggtccggtgttctggaagtgagagagacaatgtcacacttcaaggaggcagctctctagacaggaaggttattcacgtcccatgtcaagtctagctagagttcagagcaattgagaagtgcaattttatctcctgcctttcattctataccctgcttctgaaccatcgtgttcaactgtgaaactcacactttggtgaccctgactccaaaacttaatacacccaaggtcagccccagtgatctgcttcatagcaaggactttgggtgggtcttcccagggagtagggcaccctcagagaatgtggctttggacttcatcacagctggggccttttgtgtcacttcagatctaaacttgtaaccgtgctagatctgtttctaatgtgacaacatcacgaaccacgagtccagaagcctaatccataatcctccctcctcatgacaaagtctcatgctctgtgctcaacatggttagctgcacaagatgtaaaccaaagcttcactgaaccctcgacccagatcggtaactcaagtgcatcaatcataatgaacctccccgaactcagtagttatgattatttttgaggcagggtctcactctgtcgcctgggctggagtgcagtggcaggatcagggctccctgcagccccgacctcccaggctccagcgatcctcccgcctcagcctcctgagtagttgggagtagagatgcctcccacatcgcctggctaatttttgtatttttgtggagaggggatctcgccacgttgcccaggcttgaagccagatcaagcaattgggttccttggatttccgaaatagaccccaatattctgcctttaccccggaggatgcagatgtaccttctctcaggccgatgacctcaggcctccacggtccctggagctctaggaaaggtgggcgcgatctcgcgcccacacccagtgctctgggtcataagcctggatctggaaaaacaaacgcgctttgagaagacggggactccccaggatacccctctctcccctcgtccagcctccagcccacccgattcctccccacatcctccacgtccccaggccccacccacctcttccaactcctccagggaaacccaagccctgcagcgcatggaacaaaagaagtggaaccgatacttccggaacaaggctatctgagagcagttcttcctggccctcgggttcatgtaacggcataactggaaccaaagctcacggagcaagggtatatgagagcgggtctcctcgtacaggaagtagaagatgttttgtttgggggcctcatcgtcctcctccatgtcattggccagatagctgaggacagaaatcaggttgctgctcaggggcaccaccaggagagacctccggctgaggtcagcttctcagagaggaaggtaagggaccgtccctagctcaggactggcacccaccctgcagagagccatgccttcctcaggagggctctgctggacagagacctgatcaagggcgtctcccactccttcaggatggagacaaaaacccaactggtgaccaagagtggtggcttatgcctggaatcccagcacactgggaggccgaagcaggaggatcacttgaggccaggagtttgagacaggcctgggcaacatagcaagaccctcgtctctattaaaaatataaaaaatacaccagacgcggtggctcatgcctgtaatcccagcgctttggaaggctgaagcaggtggattgcttgagaccaggagtttgagaccagcctggtcaacacagagaaaccccatctatactaaaaatacaaaaatcagcctggtgcggtggcacacccattagtcctagctactcaagaggctgaagcataagaattgtgtgaacccaggaggcggaggttgcagtgagccaagattgggcccctccattccagcctgagagacacagcaacactcttgtcttgataaataaataaataaataaataaataaataaataaataactgtccaggtgtggtggtacagccctgtagtcggagctaatcaagaggctgaggtgggaggatcgcttgagcccaggatatggaggctgcggtgagctatgatctcaccactgcactccagcttaggggacagggcaagtctgtctcaaaaaaaaaaaaagcaattgaatacactgatattttgccaggaccctgccttctacaggcatctagtctaatgggactgggagtaatcaggggagatgacctaatcccaatgtcacgttataataggatgtaactggagagctacgggcatgcagaagttggaagatgagggaaggcatcacagaggctgtggggtgaaccgacttcaaggaatgggtccttcccttcagaaccacatgtgtgcgggacacccagacagaaaacacaaatgcaaagtcaagtggagggcatttggaaggagcagtgaagccaagccaggaaacaccaagatggcgagccagtgtggttgtagagattgtagagagggtggaattggcactgtggaccctggcctcgatagagaaagacatcagctaaggaagttgttcaggtgggcagtgaggttgtcgtgctttggaaagatgttcaggctgcactaggaagccccctggcttggggagagactccaggaaaccccagcagggagcatttgacagtggattcgagtgatgcaagggggacctgaactgtggcctctgtcatgggaacccggaggaggctgatggcttttgcggttgatgtgggaaggagagagagagaagaaccggaaacgtctgcttgctgggggaagtgtcatgtccgctcctccgctccttttcttctccccttaggagcggttcatggttccttttgttttttgttcttttttttttttttttttttttttttttttgagacggagtctcattctgtcgcccaggctggagtgcagtggtgcgatctcggctcactgcaagctccgcctcccaggttcacgccattctcctccctcagtcctcagagtagctgggactacaggcgcccgccaccacacccggctaatttttgtatttttttttttttaagtggagacagggtttcaccatgttagccaggatggtcttgctctcctgaccttgtgatccgcccacctcggcctcccaaactgttgagattacaggcgtgagccaccgcacctggcctgttttactcttgtatttgtacactggcattggagtttggtttttttgcctggtttttttttttttttttggcttttttttttttttttttgagaaaaagtctcactctgttgcccaggctggagtgcagtggctcaaccttagcatactgcaacctccacctcctgggttcaaggggttctcttgcctcagcctcccaagtagcttggattacaggtgcacaccaacatgcccgactgatttttctatttttagtagagacggggttttgccatgttggccaggctggtctcaaactcctgacctcaggtgatccgcttgcctcagcctcccaaagtgctgggattacaggcctgagccaccatgcacagcctgagtttctttttagaaataacagtctaagatactataatcctgtcttttttgtacacagagtaaagaggacaaataggtgaaagaataaatgaaaggctggaatcccacttcccccgctgtcccagggcattggatattgatggataggaggcagcaaaccactcacagagccaggaagaaatgaatgcgttggtattgccaggaggggaggccggcccggctgaaatacgctatgaccatagccaggagatactgatggagagaaaggaacacagagagggagaggtcacatcttgggagaggaagattgtggagatagtggaatgggggtctggggaggggctgcccatcagagaagggacctcagcattggggtgactgtgctcatgtggaaattgcggggtggaggggtattcgaaggtcggatgcaaatccgagaagccggaggaagggttttcggtgatgctcccaggatggtgggctccgatgggatctttggagggggtgtgtctaggtcggctggtgtcaggagggtcttttgtgtgccaggcagagaactgtcccaaggagctgagagtagagggcccaggagcttcagggctgcagccagactgtggcccagggctcagatcccaaaggactcataggggaggcaggggccactcattcactctgcaagagaccagcagaatcctgacggagatgctgacaaatcataaaaagacaaagaatagccgggagtggcagctcaagcctgtgatcccagtactttttgagaggtggagacaggaggatcatgtgagcccaacagttggagaacaacctgggcaacacagcgagaccctgtttctacgaaggtttcaaaaattagttgagcatggtagcatgtgcctagtcccagctcctcaggaggctaaggaaagaggattgcttgagcccaggaattagagtgagctatgatcatgccactgtactccatcctggggagcagagctggactcttgtctcagaaaaaaaaatgtgtgggtgccaagactcaagaccatgggagctggtcagacacagtgctgacgtctgtaatctcagcactttgggaggccaaggcgggtggatcacctgaggtcaggtgttcgggaccaatctggccaacatggcaaaaccccgtctctactaaaaacacaaaaattagccaggcgtggtggttcatgtttgtaatcccagctgcttggaggctgaggtgggagaatcgcttgaacccaggaggcatcagctgcagtgagtcaagatcgagacactgcccttcagcctgggcaacagagcaagactgtgtctcacaaaacaaaaacaaaaacaaaaacaaaaaaaaactgtaggagcatctggtgggaggtggtggagggagaactgtgggtttggaagctgcgccctccccctggccgtgcgttagaacaggaacacagttacatagagaacaaccttaccttgtccgacaccctcagatctttgtcccaggccaggagtcttttaatgacaggatcctctgtgattagagagcagatgtcagtgtgagaagcaggacagggtttccgtgagagcagcagggcagtgaggagaagtgtgcctcccgggggaaagtctcaggattgtggctgcgggtgaggtggatgggagaggggagaatgactttcactgggcaagggagagaggctcctgctctgagactcccctgagaagaggccgaaggaggccctgggtgtgagaatctacaggatgtagagctgggaatcagccaggaccccctccagcagacacggagggaccactgcagagtcataaaggaattcccatcatttcctcatgagacagtcacacatcagggtgtgaccatggccttgggatccctcactatggatggagacacttaggtttagaaaagtcagtaagaaacattaagtttcagagggcacagctgaaaccacttttttgatttttgattttgtttttctttatttgatttttatttttatttatttattaatttattttgagacagagtcttgctctgtgggccaggctggaatgcattggcctgatcttggctcactgcaacctctgcctcctgggtttaagcagttctcctgtctcagcctcccgagtagctggaactacagggatgagctactgtgcccagccttggtttttcttttgacgcagagttttgctctgtcacccaggctggagtgcagtggtgcagtcatagctcactgcagcctcaaagtcctgagttcaagcaatcctcttgcctcagcctcccaacgtgctgggatctcaggcgggagccacagcgcctggcccaaaaccaagctttcttatcccaagcaccgacctttatcaagtctacctaatcctctgttgtctccttaagtgtccctcatgagtgatcacttcagagtcctcccgcatggagagctcacccactggggcatatttttcccattggaaaagtgtggttattggaagtttcctctttagaaagaacaggattggaggtgctctctggggtgtcctcctaccaagcagcctgttgaaggcctcgtagtactcagggagcacgagcgacactcgccgtcgcttcgccttcatcttgaggccacacagcgtctccgccacccaggtctcctcaggctcaggggcgagctccttctctggctcatcatcagattcatccaaacattccctcttccttttccagccaagggacctacgtggggggctgggatctaccccaggggctgagtaaagaaaccaggccaccgtgtaatgcttctgcaactgatcacgttagaccccgaccccaaaccccaaaccactctccatcctccccagcctcgcagactgctggcttctccaagccacctttctgactttctcctctgctcaaccccatgtgccactccttcccctccccattcttccctctctctgtcctcagaacactgcctcatatccttccctggtccctggctctctgagtccctctttttttttttttttgtttcgagacagaatcttgctttgtcacccaggctggagtgtagtggtgcaatctcagctcactgcaacatgcatctcccggattccagttattctcctgcctcagcctctcaggtagctgggattacaggtgcctgccataatgcccagctccattttgtacttttaatagagacagggtttcaccatgttggccaggctggtctcaaactcctggcctcaagtgatccgcctgccttggcttcccaaagtgctgggattacaagtgtgagccactgcacccagcctgaatttctccattcttcccacacaccctccccaggttctccttcctgacctctgacccttcttttttttcttcttttttttttttttttttttttttttttttttttttttttgagatagcatctcacgctgtcacccagactggagtgcagtagcacgatctcggctcactgcaacctcttcctcccaggctcaagtgattctcctgtcttagcctcccaagtagctgggattataggcacacaccactaccgcctggctaatttttgtacttttagtagagatggggtttcaccatgttggccaggctggtcttgaactcctgacctcaggtgatctgcccgcctcagcctcccaaagtgttggggttacaggggtgagccaccacgcctggcccccttccttcatcttagtcaatcctatgccacctcttcttcctccagtcccctcacctgatggtcccgacacttcatcatccaccacctcctggagggggtaccctgaggtgctccgctgggggctctgctcttcctggggctgcggttgatggctcatcatgatctttcccaaaatctgtcccatctcaccaaacctagtctctgttctgtccttggtcttcttctggacactgctgggatccagaagagtgtgttatcaattctcgaggctgggagaagtcaggagtggagaacagctctgagaagttactgttgtccaactgaactcccaggtgccgacagagtccggtccctccaatcaggaaggtcggaatctctgatgtcatcgctcatgccaacctggcaaccagtttgaaaaaaaacacatgtaactgccaggctgatctcttgtcctggagatcctgggtgaatggtatctcctgccactgtcccaacctcagaccactgtccaaaagcatcttcagggtctccgcatccctctgttccctgtcccagcagaggctgtgtcctctccactcaaagcttgaagcgtgttggggtctcctcttctctgtacatgcccgtttcagagtccagtctggtgggagagggatcaggatgggaaagaaaagtagggtaagcagaaacgatgaaaccttacaagagtgagattatcatgtacaagagatcccaggaacattgacttgatgaaaaagtcacatcagagcactcaatttggcagaggttttctgccgaatgtctactgacattcactgtccgagattctgtactgggggtacacgcgtcctctgccctaaggcatctttgagtccaagagatactttgaggactggaaatcataggaaactgcccatgagttcacacatatttccaatggtgtccccaatttcagggagtccacggatcacctaaagccagcccctccagtttggctaagaaactctatatatcaagttttgtatcatatgtattgctcttaactcagaaaattccaccatttatagcagtggtttatttatttataccattgaaggaaatggtttatttatgaatctatattacggatattctataagatactgggtgtacaaaaagactaagtcgaaaaatctcagctgtgcacagtggctcatgcttgtaatcccatctctttgggtggccaagggaggaagactgcctgaggccagcagttcaagaccagtataggcaacatagcaagagcccatctctaaaacaaaacaaaacaaaacaaaacaaaattagccaggtgtcgtggctggcacctgtgttccaacaacttgagagactgaggtggcaggaggattgcttgagcctaggagttaggggctgcagtgagctgtgatcgtgacaccgcactccagtctgggcaacacagcaagaccttgtgtcaaaaaaatttttttaattaaatataaaagagtttcatgacattcagagaccatccaaagaacctgtgggttctggccaggcacagtggctcacgcctgtaatcccagcgctttgggaggccatagcaggtggatcgcttgaggtcaggagtttaagagcagcctggccaacatggtgaaaccccatctcttctaaaaatacaaaaaattagtcaggcatggtggtgggtgcctgtaatcccagccactcaggaggcggggacagcagaatggcttaaacttgggaggcggaggttgcagtgagccaaggtcgcaccattgcactccagcctgggcaacaagagcaaaactacatctcaaaaaaaaaaaacaaaaaaaaaacaaaaagaacctgtggatgagtt

SEQ ID NO: 1812 - DNA, 4418 bp, Homo sapiens
tttcttatcccaagcaccgacctttatcaagtctacctaatcctctgttgtctcctaagtgtccctcatgagtgatcacttcagagtcctcccgcatggagagctcacccactggggcatatttttcccattggaaaagtgtggttattggaagtttcctctttttagaaagaacaggattggaggtgctctctggggtgtcctcctaccaagcagcctgttgaaggcctcgtagtactcagggagcacgagcgacactcgccgtcgcttcgccttcatcttgaggccacacagcgtctccgccacccaggtctcctcaggctcaggggcgagctccttctctggctcatcatcagattcatccaaacactccctcttccttttgcagccaagggacctacgtggggggctgggatctaccccaggggctgagtaaagaaaccaggccaccgtgtaatgcttctgcaactgatcacgttagaccccgaccccaaaccccaaaccattctccatcctccccagcctctcagactgctggcttctccaagccacctttctgactttctcctctgctcaaccccatgtgccactccttcccctccccattcttccctctctctgtcctcagaacactgcgtcatatcgttccctggtccctggctctctgaggccctctttttttttttttgtttcgagacagaatcttgctttgtcacccaggctggagtgtagtggtacaatctcagctcactgcaacatccatctcccggattccagttattctcctgcctcagcctctcaggtagctgggattacaggtgcctgccataatgcccagctcaattttgtacttttagtagagacggggtttcgccatgttggccaggctggtctcaaactcttggcctcacgtgatccgcctgccttggcttcccaaagtgctgggattacaggtgtgagccactgcacccagcctgaatttctccattcttcccacacaccctccccaggttctccttcctgacctctgacccttcttttttttcttcttctttttttttttttttttttgagacagcgtctcactctctcacccagactggagtgcagtagcacgatctcggctcactgcaccctcttcctcccaggctcaagcgattctcctgtctcagcctcccgagtagctgggattataggcacacaccactaccgcctggctaatttttgtacttttagtagagatggggtttcaccatgttggccaggctggtcttgaactgctgacctcaggtgatctgcccgcctcggcctcccaaagtgttggtgttacaggggtgagctaccgcacctggcccccttccttcgtcttagtcaatcctatgccacctcttcttcctccagtcccctcacctgatggtcccgacacttcatcatccaccacctcctggagggggtaccctgaggtgctccgctgggggctctgctcttcctggggctgcggttgatggctcgtcatgatctttcccaaaatctgtccaatctcaccgaagctagtctctgttctgtccttggtcttcttctggacactgctgggatccagaagagtgtgttatcaattctcgaggctgggagaagtcaggagtggagaacagctctgagaagttactgttgttcacctgaactgccaggcgccgacagagtccggtccttccaatcaggaaggtcggaatctctgatgtcataggtcattccaacctggcaaccagtttgaacaaaaacacatgtaactgccaggctgatctcttgtcctggagatcctgggtgaatggtatctcctgccactgtcccaacctcagaccactgtccaaaagcatcttcagggtctccgcatccctctgttccctgtcccagcagaggctgtgtcctctccactcaaagcttgaagcgtgttggggtctcctcttctctgtacatgcccgtttcagagtccagtctggtgggagagggatcaggatgggaaagaaaactagggtaagcagaaacgatgaaaccttataagagtgagagtatcatgtacaagagatcccaggaacattgacttgatgaaaaagtcacatcagagcactcaatttggcagagcttttctgccgaatgtttactgatattcactgtccgagattctgtactgggtgtaacgtgtcctctgccctaaggcatctttgagtccaagagatattttgaggactggaaatcatcggaaactgcccatgagctcacacatatttccaatggtgtccccagtttcagggagtccacggatcacctaaagccagcccctccagtttggctaagaaactctatatatcaagttttgtatcatatgtattgctcttaactcagaaattccaccatttatagcagtggtttatttatttatactattgaaggaaatggtttatttatgaatctatattatggatattctataagatactgggtgtacaaaaagactaagtcgaaaaatctcagctgtgcacagtggctcatgcttgcaatcccatctctttgggtggccaagggaggaagactgcctgaggccagcagttcaagaccagtgtaggcaacatagcaagaccccatctcaaacaaaacaaaacaaaacagaacaaaattagccaggtgtcgtggctggcacctgtgttccaacaacttgagagactgaggtggcaggaggattgcttgagcctaggagttaggggctgcagtgagctgtgatcgtgacaccgcactccagtctgggcaacacagcaagaccttgtgtcaaaaaaatttttttaattaaatataaaagagtttcatgacattcagagaccatccaaagaacctgtgggttccggccaggcacagtggctcacgcctgtaatcccagcgctttgggaggccatagcaggtggatcgcttgaggtcaggagtttaagagcagcctggccaacatggtgaaaccccatctcttctaaaaatacaaaaaattagtcaggcatggtggtgggtgcctgtaatcccagccactcaggaggcgggggcagcagaatggcttaaacttgggaggcggaggttgcagtgagccaaggtcgcaccattgcactccagcctgggcaacaagagcaaaactacatctcaaaaaaaaaaaaaaaacaaacaaaaagaacctgtggatgagttcccacatggcttcctaacgggctgcggctctcctaggagtctctcgctcatgggaaaggcacaaactgaatgtggaaggaaatcccattgctgtggaagtcccattgttaggaagctctgcttttctggagttcaaatttgcattcatgacgctttaaaccgtcagagctgggtgtgtcctcctacaacaaatcactttactctctctctctcctagttaacaggctttcaaatattagaacatccatgttctgacctcattaaaattgctcttttgtggaatgaaaagctctgatttaacccgtctttaagcctggtatgcatattcctctctgttccggccaccttgtctagacacactacactgaggcagtgcccatcttagatgatgttgatacattgtcaaaaaatgggcaaaccaggcgcggtggctcacacttgtaatcccagcacttttggaagccgatgccgacagataaccagaggtgaggaggttgagatcagcctggccaacatggtgaaacctgtctgtttttctgtaaaaatacagaaacaatgagctgggtgtgggagtgcacttctgtaattccagctacttgcggggctgaggcaggagaatcacttgaaccgggatggtggaggttccagtgagccgagatcacgacactacactccagcctgggcgacagagtgagactccgactcaaaaaaaaaaaaaaagtgccagacagcccaggtttggtctgatatgttcagaaaaaagcaaaacagtcacctctcaccttttcttttcctgcaatgatgccgtttaatacaacaatggctgtaggtctgcggcagaaatatcattcaagtgaaacagaagggctttcctggctggacacagtggtcactcctgcaatcccaacactttggttggctaaggtgggaggatttcttgcggccaggagttcgaggctgcagtgagctgtgatctaccactgcattccaggctgggcatcagagtgaggcctgtctctaaaaaaaacccttcactccccaaaaaaagggattttcaaataccagcctttcagcatgaggatcacatggaggaacattaagacacagatgctgggacccagccctattgattgtaattaaaaaactgaggtgaggcctgatttagctccatcattggaatccattcagatttgaaa

SEQ ID NO: 1813 - DNA, 45300 bp, Homo sapiens
tttaagtgattcttctgcctcagcctcccaagtagctgggattacaggcgcccaccaccatgcctggctaattttttgtatttttggtagagacagggtttcacgacgttggccaggctggtctcaaactcctgatctcaagtgatccacctgcctctgtgtcccaaattgctgggattacaggcatgagccaccgcaccggccatgctttcagttttcaagaaagaagacaccattattgccaaagattttggtaatttgagagatacaatgtatgttttctccatgtggatactagatagtaaggatgtgttgaatttgaagtgtctatccagaagtattttgggtacttgtttaaggattgtaaaacaatgtttccatttctggatataataaatgtatttgttaatataataaatgaatagattagacccataaactatttgcagtgttgagtcatttcccacagttaaaatcaggatgaaaatatatagctgaatacctgctttgtttcttgtaactgatttctttagtacagaacctgctaaggccatcaaacctattgatcggaagtcagtccatcagatttgctctgggccggtggtactgagtctaagcactgcggtgaagaagatagtaggaaacagtctggatgctggtgccactaatattggtaagtttgggagagttttaagccacaagaaatgatcagtgaatgttgttgtagtcaagaaacatttgttattgaaataagactatcaagtgttgatgtagtaataaactattatttttaagttaaagttagcacctattatgtgcctagtacttagctaggtagtaataataataacgacagcttttcttgtgttcttatggtgtgccaggcaggtgttatgctaagaattgcacagaaatatctcatttaatttgcagaatagctgggcgtggtgtctgacgcctgtaatcctagccctttgagaggctgaggtggggggattgcttgaagccaagagttcaagaccaacctggccaacatggggagacctcgtctctattaaaaaataaagcaggccgggtgtggtggctcacgcctgtaatcccagcactttgggaggccaaggcgggtggatacctgaggtcaggaattcgagaccagcctgtccaaaatggtgaaactctgtctctactaaaaatacaaaaattagccagacctggtggcagaagcctgtaatcccagctactggggaggctcaggaatgagaattgtttaaatttgggaggtggaggttgcagtgaaccgagattgtgccactgcacgccagcctggggacagagcaagactctgtctcaaaaaaataaaataaaataaaataaaataaatcctggagtagtggctcacatctgtaatcccagcactttgggaggctgaggggggctgatgctttgaggtcaggagttcaagaccagcctaaccaacgtggtaaaaccctgtctctactaaaaatacaaaaattagccagatgtgatggtgcatggctgtaatctcagctcctcagaaggctgagggaggagaattgcttaaacctgggaggtggaggttgcagtgagccaagatcgattgtgccactgcattccagcctgggtgacaagagcaaaagtccatctcaaaaaattaaaaaaaaaaaaaaaaaagggaagaaaaaaaagaaaatgacaaaattaaaaaaaaattattaatctgccaaataactttatgagatagaacttattacctccattttacagttgaggaaattaagggacagtaaatttcctttttttgagattataaagctaataaaatagaatctaggaagtctgattccagaaccagttctgtttttttttcttttttttttttttgagatagagttttgctcttgttgccgaggctgcggtgcaatggcacgatctcaactcactgcaacctccacctcccaggttcaagcgattctcctgcctcagcctcacaagtagctgggattacaggcatgcaccaccacgcctggctaattttgtatttttagtagagatagagtttctctacgttggtcaggctggtctcgaactactgacctcaggtgatccgctcgctttggtctcccaaagtgctgggattacaggcatgaaccactgcgcccggcccccgttctccttactgggtatgttaaaattatttctttcaaaggaaaaggctggtcaaagtgcaacggtctttacaactaattgatcacaaccagttacagatttttttgttccttctccactccaactgcttcacttgactagtgtaaggaaaaaaaaaagaggaaagaaagaaaatgctaaactatttaatctgggctagtaaatggccagaaagaactttataaaaatgaaatatacaaaatgacactagtatgtttaactaaaggtatagttacgacacttaaatttgcacgttataaataatatcaatataaaaactgatagcgtgggtccatttttaataaatatataaatattttaaactttctagatctaaagcttaaggactatggaatggatctcattgaagtttcaggcaatggatgtggggtagaagaagaaaacttcgaaggcttaagtaagttaactttctaatcctattacaaaataattgggccacatgtcttagaattttgagtaacactgtcttgggaaacacaaaaacagttttttaaagccagttactagatatcatgtatatttgttgttatagcacttgagatatcttagtccttactttacagtctctttcagctctgaaacatcacacatctaagattcgagagtttgccgacctaactcgggttgaaacttttggctttcaggggaaagctctgagctcactttgtgcactgaggtgagaaaatatttttatccattcacttgaccccttagaaaaacctctctgaaaattaattggaatcattattatttacaattttctatctcaatatctcagcttctagcttctgaattctgttttgtctcactgccaatctaagtcctagtacttctgaaatgtgagcaataaatgaatgaaatgaagcaaatagtattctttaaaaaattggttacccttattaaaacagtaacttctcaatttgaacataacatatagataataaatgatagttaccattggttttcattatcaatttttagggaaacatttcaccaaagcactatttaattacagcacagatactaaatttttataaataattacatgcacacacacatatatagacatatatatacatatatatacatatatatacatatatatacatatatacatatatatacatatatacatatatatacatatatacatatatacatatatatatacacatatatacatatatacatatatatacatatatacatatatatacatatatatacatatatatatacatatatatacatatatatacatatatatatacatatatatgtatatatatatatatatattttttttttagacagagtcgcactctgtcacccaggctggagtgcagtggcacagtctcagctcactgcagtctctgcctcccaggttcaagtgactttcgtgactcagcctcctgaagagctgggactatagcgtgcaccaccactcctggctaatttttgtatttttagtagagatggggttttgccatgttgcccaggctggtctggaactccaggcctcaagtgatctgccctccttggcctcccaaagtgctggaattacaggcacgagccaccgcaccctgccctacatatacattttaattataatatcttttggattctttaaaaaaaattttaaaaattttaaaaaattctttaaaaaaattcttttaaaaaattttgtttgaagagtaataacaaaacaaatctctatttgagaatcaataaatcttgagatcatttatggttttgcaattcaacctgaaaaatgaagtcaaagcttttatcaaaacaaagcatgtttagtgctctctgtctcactgtcttttagatgccagaccttagattttgtgatgactcctcaaccgtttagatctcggttatctcagagggatcatcagctttttaagaaaattttgagagaaaagcaagtgaagaaaagagtagtcagtgcccaacatcatggatctctcactgaacacaccatgcctggtattctctcacagtgatgtcaccatttctacctgccacgtatcggcgaaggttgggactcgactggtgtttgatcacgatgggaaaatcatccagaaaaccccctacccccaccccagagggaccacagtcagcgtgaagcagttattttctacgctacctgtgcgccataaggaatttcaaaggaatattaagaaggtacagtaaattaatcctggttttcaagagtattggttaatgcacatgagcaaaagatttactaaagatgtttattcttcagttgattctcttcccataatttattgagaaatgctttatttgcatttctcattaaagacttaacttcaggatgatttacttttttctttttatcacataatgtttattaggactgggaaacatagtgagactctgtctctatgaaaaattaaaaaaaaaattgactgggcatggtggcatgcacctgtagttccagctacttgggaggctgaagtgggaggatcacctgagcccaggaacttgagactgcagtgagctatgattgcgtcactacacttcagactgtgagacagagtaagaccctgtctggaaaaatatatatacatatatatacattttttttattttttatttttatctttttttgagatggagtctcactttggcgccctggctgcagtgcagtggcgcgatctcagttcactgcaacctccacctgccaagttcaagcgattctcctgcttcagccttctgagtagctaccattacaggcgcgcgccaccacgcccggctaatttttgtattttcagtggagacggggttccaccatgttgtccaggctggccaggctggtcttgaattcctgccctcaggtgatccgcccacctcggcctctcaaagtgctgggattacaggcgtgagccaccatgcctgaccttatgtacttatatttttatgagaatatttctcttggttttctgataaatgagttactggaacccttatgaatttgaatgcaaatgaaacagctaaatgttatataattgttgtgtttaaaaagcagattataaaactgtctgtattatatgattacagttttataaaaacaaaacaggcctaaatgtgtatagtataaagactgaagagtcagcacttccatgttctcagcggttatccttggatgtgagatctcatgcactttttgctctcttctttgtgcctttccattttgcatgcgtatttcttataatctaaaaagttacttaaacatatgcagctaaaaactttttttacttgtaaagcgtttggtgctaattttaacttttttttttagacggagtcttctcactctgtcgcccaggctggagtgcagtggtgtgatcttggctcactgcaacctccgcctcctgggttcaagtgattctcctacctcagcctcccaagtagctgggattataggtgtgtgtcaccacacccagctaatttttgtatttttagtagagatggggtttcaccatgttggccaggctggtcttgcacccctgacctcaagtgatctgcccacctcagcctcccaaagtgctgggattacaggcgtgagccaccacgcctggcttttttttttaaagcttttttgtaagtcagccagcaagaacacaggaggaagtactcaaatctcccttacacagctgggggctgtgtcaggttttataagcatagggtaatgaggtgtgatttgattggatcttgcaataaagtaatgctgggaggtgtgatctgactggatcctgccatggggtgacaccaaaactcaatctgattggatcctggctcctgcctgggggtgtctggttcttaaatcggtccgagctcttcaggctgagctcttaggttccactccacggtggcacgcgtggttaacctgggcatgcacagggtacatgaccttcaacctgcaggtcgatggcaattggaaaacaactgacaacttcattacataaaagttgaactgattcgggtgcggtgactcacgcctgtaatcccagcactttgggaggccaaggcaggtggatcacctgaggtcgaggagttcaagaccagcctggccaaaatggtgaaaccccgtctctactaaaaatataaatattagccaggcgtggtggcgcacccttgtaatcccagctaccccagaggctgaggcagcagaatgcttgaacctaggacgtggaggttgtggtgagctgagatcgtgccattgcactccagcctgggtgacaagagtgaaactccatcaaaaaaaaaaaaagttgaactagatttggtctgatgcagttacagatttacaaaccgcgtcccaccctcctgccaacaccttccactcctcattcttgagggattagggatggaggtcatgcttctgtatcgacttcatgctgaccaggggcacttagtcccctaaagtgagaggaatgaaactcttgggcttctgagttcagatgagttctggggtcacccggagtagcttgaaaggctggtattgttgtaatacaagctgaaggtggaagtgttggatcctggaggacaaacagctcaccatccatttaaataaataggaccaaaaagtaacagaacagtggccacgaggggccccaacagaggaagaaaccaggtgaggtgtggtatagtggactcgactgccttctaaatctcagtggttgtccgggtgcggtggctcacgcctgtaattccagcaaaagaagagccgaggcagggtgatcacgaggtcaggagttcaagaccagccgggcaaacatggtgaaaccccgtctctactgaaaatacaaaaattagccaggtgtggtggcgtgtgctgtagtcccagctactagggaggctgaggcaggagaattgcttgaacctgggaggcggaggttgcagtgagccgagattgtgccactgcactccagcctaggtaacagagcaggaccccatctcagtcaatcaatcaatctcagtggttgaactacccttgatatggttcagctctgtatccccaaccaaatctcatgtccaattgcaattcccagtgttgagggagggacctggtgggagatgattggctcatggcggctgacgtcccccttgctggtctcgtgatagtgagtgagcgctcatgggatctggttgtttagaagcatgcagcacctcctgcttcactctctctgtctctcctgctccaccatggccagaaacgtgcctgcttccccttcgccttctgccgtgattgtcagtttcttgagggctccccagccatgcttcctgtacagcctgcaaaactgtgagtcaattaaacctcttttcttcataaattccccagtttccagtagttctttatagcagtgtgaaaacagactaatggacccttctggttgaaggaatgtagccattctgcttgtttaagtatttcctttctattcatctctatttcccgggaggtgtttatccaagtgcaataggagatattggtgactgcagagtcccctcagtgttctgctagtaaatagttgaaggttgatcagtgatctccagcattttcagtctggcatggaaaagcccccatgtaactggtaaaggtatcagtaagcaccaggaggtatctaaatccaccaggagccataggcatcatgttgatgtccatttaccagtcttccctggcaagattctctgaattgtactgccttggccaaaagaggtatgggaggggctgggcacagtggctcacgcctgtaatcccagcattttgggagaccaattcgggtagatcattagaggtcaggggttcaagaccatcctggccaacatggtgacattccatctctactaaaaatacaaaaagtcagcggggtttggtgttgggtgcctgtaatcccagctactcgggaggctgaggcaggataatcacttgaacctgggaggaggaggaggtggcagtgagctgagatctcgccattgcactccagcctgggcaacaagagcgaaacttcatctcaaaaaataaaacaagaagtctgggtgtggtggctcgtgcctgtaatcccaggactttgggaggccaagatgggtggatcatgaggtcaggagttcaagaccagcctggcctagatggtgaaaccctgtctcgagtgaaaatacaaatattagctgggcatggtggcacacacctgtaatctcagctactcagaagtctgagacagaagaattgccaaaacccgggagggagaggttgcagtgagccgagatcgcgccactgcactctagcctgggcgacagagcaagactccgtctcgaaagaaagaaagagaaaggaaattccccagggaagtacctcggcttatttcatgaagaggtactgaaggaagcagaggcatgtggaggacttccccacctcgtgcagctatttgggccgtggcgtctgaaatttcttatttcagagtcacccctttgatgaccttggcagtggactgcagtcatctgtttaggcctctccatggcccgtgtcaatgccgatatttctgtctgttgcacatttgatttccttgttgttggcatttagaaggccccctgtttcccagatcacaccacgggcatggaccgcagagattgcatcttgtgagtctgtagaaacagtcaaggccttgtcctctcttaggtccagagctcaggtgaatgcagattttcccggccatctgtgctgaagtccctgtggggaggctcctggctggtttcctgtaggtagacagctacacatcctgcccttcattggcttcttttcatgaagctcctgctgtctacaaaacatgtctcccttttcttcttgaaccacatctctgttattgaaactctagaagtcagccaggcacagtggctatgcctgtaatcccagcactttgggaggccaaggtgggtggatcacctgaggtcaggagttcaagaccagcctggccaacatggcgaaaccctgtctctaatacaaatactaaaattagccaagcatggtggccactgcactccagcctgggtgacagagcaagactctgtctcaaataaagaaagagaaagtatcatgcttttcagagttctgtgggttgttatggtgaattatcaaacctgaggacgtggtgggaacctccaaatttgcagccagttggtgagaagtacatgcggtctgtggacacccaagcttgcagctgcatctgaagcgagggcagcctagcgggggctggtggccttaacctgtggcatttgatgtaacatcagggagttgacatcagaattacgtcacacaggccaggtgcagtggctcatgcttataatcccagcaattagaaaggcaagataagaagattgcttgagcttgagtctgagcccacagtgagctatgaccgcaccactgcaccccagtctgggtgacagcacaagaccccgactccaaaaataaaaaagaaaaatcacaaagaattgcatggcagagtgcctgtctttcacagcttgaactgttgcaggaactttctttttttttttttcttttgtgatggagtctcgcgctttcacccaggctggagtgcagtggcgcgatctctgctcactgcaggctccgcctcctgggttcacaccattctcctgcctcagcctccggagtagctgggactacaggcgcctgccaccgcgcccagctaattttttgtatttttagcagagatggggtttcaccgtattagccaggatggtcttgatctcctgacctcatgatccacccacctcagcctcccaaagtgctgggattacagtcctgagccaccgcgcctggacttttttttttttttttgagaggggttggggagacatattctctgctagtgattctcctgcctggtctcgaactcctgctgggatcacaggcgtgagccaccacgcccagccacctttagagttttcttaccacctggttttcctctctcaatatctttctctcatttcctgctttaaaactctagcttggggtctgggcacagtagctcatgcctataatcccagcactttgggagactgaggcgggtggatcacttgaggtcaggagtttgagaccagcctggccaacatggtgaaaccttgtctctactatttttacaaaagttagtcagacgtacaggcggatgcctgtagtcccagctacttgggaggctgaggcaggagaatttgcttgaacgccgaggtgaaagttgcagggagccgaggttgtgccactgcactccagcctgggagacagagcgagactgtctccaaaacaaacaaacaaacaaacaaacaaaaaaaccctgtagcttgggatcagccttctcttctgttgtttttctttaaaaaataaaaattaaaaataggcttcaagtgatcctcccgccatgacctccaaaactgctgggattgtaggtgtgagcactgcacccagccgtatgtttttttctacataaaaaacagcacaggattatcttccaaagctaacaaatatgttcaaataaccacaaccccattaaggaaaaatgtcacttgacagcaaataatcaatccagaccacaatatgatcacactcactgtgaaggtgagaaaagttcatctttattatgtttccccaagagatgcactgcactgttctcttgaaaacacacagctcatgtcctcctttagaacacacatcctctttaaagtaacatacaaacatgccaaaacaagataaaaaattccatctgaattctcacatttcaaacatacactaaatatcaaataaaaatttatttttacaagaatttaggggaactaccacatagctataaatgtaatatatatgttaactaagtatcatagataaaaaccatgctcccttcagcagcacgtgtaataatagatacaaagattgaaaggtaaaagatttaggatgaaaagaatcctctcttaaaaaggaaaacaaaattatatgtatgtgtatacaacagttataatacccatcacacagctttatagaaacagcatctattcaaaaataccagtatttccaaaatatttaaaataatatttaaagtaataataatatttaaataaataaatatatttaataaatatttcagtaaataaaataatatttaaataattctatacccatgtttttcaaaataaaccaataaaatagatagtatatattagacgtgttagtatatatatctgagacatgttaaaaatcacaactgaattctcacaagtcagtcacaaacctaaacagcaaataaaaatttctatcaccagaattatgtttttttctggtggggaactaccaatagctataaatagaagagattattatggaagtatcatagataaaaagagtgctcgcttcaggagcacatataataatacagaaaaaaatttaaagataataaaagatttaggataaaaagaattctcacttaaaaatgaaaagaaaattatctttaggtatatataacaactataactctcatcaaaaaactctacaggaacagcatgttttcaaaagtacaacaatttccaaactatttgaaataaacctattaataattcaatggccaacattttccaaacaaaccaataaaatgcatagtgtgcatgaagctatctgttacagtctgtggcactcatatttcacaaagaattctgtgccaatctgagcccctgcactgtgccttcaaatgctcctggactgtggcaaccaagtccataagaaacaggacctccaggttccgccccagggaggttggcattcagcaatataaaaagggaggtggtgccgcaggaaagggtggaactggaaacactcctggtttcttacttttctccaaggactcctagaagtaccccaccccacccctgctccttggaggacaacgtgatcactgtattcagctctgtcaagaatggtccaggttcttctagatgatctgcaccaatggttcctctcctccttcctgatgtctgccattagcattggaataaagttcctgctgaaaatccacatctcccctgggtccggtgttctggaagtgagagagacaatgtcacacttcaaggaggcagctctctagacaggaaggttattcacgtcccatgtcaagtctagctagagttcagagcaattgagaagtgcaattttatctcctgcctttcattctataccctgcttctgaaccatcgtgttcaactgtgaaactcacactttggtgaccctgactccaaaacttaatacacccaaggtcagccccagtgatctgcttcatagccaggactttgggtgggtcttcccagggagtagggcaccctcagagaatgtggctttggacttcatcacagctggggccttttgtgtcacttcagatctaaacttgtaaccgtgctagatctgtttctaacgtgacagcatcacgaaccacgagtccagaagcctaatccataatcctccctcctcatgacgaagtctcatgctctgtgctcaacatggttagctgcacaagatgtaaaccaaagcttcactgaaccctcgacccaaatcggtaactcaagtgcatcaatcataatgaacctccccgaactcagtatttatgattatttttgaggcagggtctcactctgtcgcccgggctggagtgcagtggcaggatcagggctccctgcagccccgacctcccaggctccagcgatcctcccgcctcagcctcctgagtagttgggagtagagatgcctcccacatcgcctggctaatttttgtatttttgtggagaggggatctcgccacgttgcccaggcttgaagccagatcaagcaattgggttccttggatttccgaaatagaccccaatattctgcctttaccccggaggatgcagatgtaccttctctcaggccgatgacctcaggcctccacggtccctggagctctaggaaaggtgggcgcgatctcgcgcccacacccagtgctctgggtcataagcctggatctggaaaaacaaacgcgctttgagaagacggggactccccaggatacccctctctcccctcgtccagcctccagcccacccgattcctccccacatcctccacgtccccaggccccacccacctcttccaactcctccagggaaacccaagccctgcagcgcatggaacaaaagaagtggaaccgatacttccggaacaaggctatctgagagcagttcttcctggccctcgggttcatgtaacggcataactggaaccaaagctcactgagcaagggtatatgagagcgggtctcctcgtacaggaagtagaagatgttttgtttgggggcctcgtcgtcctcctccatgtcattggccagatagctgaggacagaaatcaggttgctgctcaggggcaccaccaggagagacctccggctgaggtcagcttctcagagaggaaggtaagggaccgtccctagctcaggactggcacccaccctgcagagagccacgccttcctcaggagggctctgctggacagagacctgatcaagggcgtctcccactccttcaggatggagacaaaaacccaactggtgaccaagagtggtggcttatgcctggaatcccagcacactgggaggccgaagcaggaggatcacttgaggccaggagtttgagacaggcctgggcaacatagcaagaccctcgtctctattaaaaatataaaaaatacgccagacgtggtggctcatgcctgtaatcccagcgctttggaaggctgaagcaggtggattgcttgagaccaggagtttgagaccagcctggtcaacacagagaaaccccatctatactaaaaatacaaaaatcagcctggtgcggtggcacacccattagtcctagctactcaggaggctgaagcataagaattgtgtgaacccaggaggcggaggttgcagtgagccaagattgggcccctccattccagcctgagagacacagcaacactcttgtcttgataaataaataaataaataaataactgtccaggtgtggtggtacagccctgtagtcggagctaatcaagaggctgaggtgggaggatcgcttgagcccaggatatggaggctgcggtgagctatgatctcaccactgcactccagcttaggggacagggcaagtctgtctcaaaaaaaaaaaaaaagcaattgaatacactgatattttgccaggaccctgccttctacaggcatctagtctaatgggactgggagtaatcaggggagatgacctaatcccaatgtcacattataataggatgtaactggagagctacgggcatgcagaagttggaagacgagggaaggcatcacagaggctgtggggtgaaccgacttcaaggaatgggtccttcccttcagaaccacatgtgtgcgggacacccagacagaaaacacaaatgcaaagtcaagtggagggcatttggaaggagcagtgaagccaagccaggaaacaccaagatggcgagccagtgtggttgtagagattgtagagagggtggaattggcactgtggaccctggcctcgatagagaaagacatcagctaaggaagttgttcaggtgggcagtgaggttgtcgtgctttggaaagatgttcaggctgcactaggaagccccctggcttggggagagactccaggaaaccccagcagggagcatttgacagtggattcgagtgatgcaagggggacctggactgtgacctctgtcacgggaacccggaggaggctgatggcttttgcggttgatgtgggaaggagagagaacaaccggaaacgtctgcttgctgggggaagtgtcatgtccgctcctccgctccttttcttctccccttaggagcggttcatggttccttttgttttttgttctttttttttttttttttttttgagactataatcctgtcttttttgtacacagagtaaagaggacaaataggtgaaagaataaatgaaaggctggaatcccacttcccccgctgtcccagggcattggatattgacggataggaggcagcaaaccactcacagagccaggaagaaatgaatgcgttggtattgccaggaggggaggccggcccggctgaaatacgctatgaccatagccaggagatactgatggagagaaaggaacacagagagggagaggtcacatcttgggagaggaagattgtggatatagtggaatgggggtctggggaggggttgcccatcagagaagggacctcagtgttggggtgactgtgctcatgtggaaattgcggggtggaggggtattcgaaggtcggatgcaaatccgagaagccggaggaagggtttttggtgatgctcccaggatggtgggctccgatgggatctttggagggggtgtgtctaggtcggctggtgtcaggagggtcttttgtgtgccaggcagagaactgtcccaaggagctgagagtagagggcccaggagcttcagggctgcagccagactgtggcccagggctcagatcccaaaggacccataggagaggcaggggccactcattcactctgcaagagaccagcagaatcctgacggagatgctgacaaatcataaaaagacaaagaatagccgggagtggcagctcaagcctgtgatcccagtactttttgagaggtggagacaggaggatcatgtgagcccaacagttggagaacaacctgggcaacacagcgagaccctgtttctaagaagatttcaaaaattagttgagcatggtagcatgtgcctagtcccagctcctcaggaggctaaggaaagaggattgcttgagcccaggaattagagtgagctatgatcatgccactgtactccatcctggggagcagagctggactctgtctcagaaaaaaaaatgtgtgggtgccaagactcaagaccatgggagctggtcagacacagtgctgacgtctgtaatctcagcactttgggaggccaaggcgggtggatcacctgaggtcaggtgttcgggaccaatctggccaacatggcaaaaccccgtctctactaaaaacacaaaaattagccaggcgtggtggttcatgtttgtaatcccagctgcttggaggctgaggtgggagaatcgcttgaacccaggaggcatcagctgcagtgagtcaagatcgagacactgccctccagcctgggcagcagagcaagactgtgtctcacaaaaaaaaacaaaaacaaaaacaaaaaaaaactgtaggagcatctggtgggaggtggtggacggagaactgtgggtttggaagctgcgccctccccctggccgtgcgttagaacaggaacacagttacatagagaacaaccttaccttgtccgacaccctcagatctttgtcccaggccaggagtcttttaatgacaggatcctctgtgattagagagcagatgtcagtgtgagaagcaggacagggtttccgtgagagcagcagggcagcgaggagaagtgtgcctcccgggggaaagtctcaggattgtggccgcgggtgaggtggatgagagaggggagaatgactttcactgggcaagggagagaggctcctgctctgagactcccctgagaagaggccgaaggaggccctgggtgtgagaatctacaggatgtagagctgggaatcagccaggaccccctccagcagacacggagggaccactgcagagtcataaaggaattcccatcatttcctcatgagacagtcacacatcagggtgtgaccatggccttgggatccctcactatggatggagacacttaggtttagaaaagtcagtaagaaacattaagtttcagagggcacagctgaaaccacttttttgatttttgattttgtttttctttatttgatttttatttttatttatttattaatttattttgagacagagtcttgctctgtgggccaggctggaatgcattggcctgatcttggctcactgcaacctctgcctcctgggtttaagcagttctcctgtctcagcctcccgagtagctggaactacagggatgagctactgtgcccagccttggtttttcttttgacgcagagttttgctctgtcacccaggctggagtgcagtggtgcagtcatagctcactgcagcctcaaagtcctgagttcaagcaatcctcttgcctcagcctcccaacgtgctgggatctcaggcgggagccacagcgcctggcccaaaaccaagctttcttatcccaagcaccgacctttatcaagtctacctaatcctctgttgtctccttaagtgtccctcatgagtgatcacttcagagtcctcccgcatggagagctcacccactggggcatatttttcccattggaaaagtgtggttattggaagtttcctctttagaaagaacaggattggaggtgctctctggggtgtcctcctaccaagcagcctgttgaaggcctcgtagtactcagggagcacgagcgacactcgccgtcgcttcgccttcatcttgaggccacacagcgtctccgccacccaggtctcctcaggctcaggggcgagctccttctctggctcatcatcagattcatccaaacattccctcttccttttccagccaagggacctacgtggggggctgggatctaccccaggggctgagtaaagaaaccaggccaccgtgtaatgcttctgcaactgatcacgttagaccccgaccccaaaccccaaaccactctccatcctccccagcctcgcagactgctggcttctccaagccacctttctgactttctcctctgctcaaccccatgtgccactccttcccctccccattcttccctctctctgtcctcagaacactgcctcatatccttccctggtccctggctctctgagtccctcttttttttttttttttttgtttcgagacagaatcttgctttgtcacccaggctggagtgtagtggtgcaatctcagctcactgcaacatgcatctcccggattccagttattctcctgcctcagcctctcaggtagctgggattacaggtgcctgccataatgcccagctccattttgtacttttaatagagacagggtttcaccatgttggccaggctggtttcaaactcctggcctcaagtgatccgcctgccttggcttcccaaagtgctgggattacaagtgtgagccactgcacccagcctgaatttttccattctttccaaacaccctccccaggttttccttcctgacctctgacccctcttttttttcttcttttttttttttttttttttttttttttttttttttttgagatagcatctcactctgtcacccagactggagtgcagtagcacgatctcggctcactgcaacctcttcctcccaggctcaagtgattctcctgttttagcctcccaagtagctgggattataggcacacaccactaccgcctggctaatttttgtacttttagtagagatggggtttcaccatgttggccaggctggtcttgaactactgacctcaggtgatctgcccgcctcagcctcccaaagtgttggggttacaggggtgagccaccacgcctggcccccttccttcatcttagtcaatcctatgccacctcttcttcctccagtcccctcacctgatggtcccgacacttcatcatccaccacctcctggagggggtaccctgaggtgctccgctgggggctccgctcttcctgcggctgcggttgatggctcatcatgatctttcccaaaatctgtcccatctcaccaaacctagtctctgttctgtccttggtcttcttctggacactgctgggatccagaagagtgtgttatcaattctcgaggctgggagaagtcaggagtggagaacagctctgagaagttactgttgtccaactgaactcccaggtgccgacagagtccggtccctccaatcaggaaggtcggaatctctgatgtcatcgctcatgccaacctggcaaccagtttgaaaaaaaacacatgtaactgccaggctgatctcttgtcctggagatcctgggtgaatggtatctcctgccactgtcccaacctcagaccactgtccaaaagcatcttcagggtctccgcatccctctgttccctgtcccagcagaggctgtgtcctctccactcaaagcttgaagcgtgttggggtctcctcttctctgtacatgcccgtttcagagtccagtctggtgggagagggatcaggatgggaaagaaaagtagggtaagcagaaacgatgaaaccttacaagagtgagattatcatgtacaagagatcccaggaacattgacttgatgaaaaagtcacatcagagcactcaatttggcagaggttttctgccgagtgtctactgacattcactgtccgagattctgtactgggggtacacgcgtcctctgccctaaggcatctttgagtccaagagatattttgaggactggaaatcataggaaactgcccatgagttcacacatatttccaatggtgtccccaatttcagggagtccacggatcacctaaagccagcccctccagtttggctaagaaactctatatatcaagttttgtatcatatgtattgctcttaactcagaaaattccaccatttatagcagtggtttatttatttataccattgaaggaaatggtttatttatgaatctatattatggatattctataagatactgggtgtacaaaaagactaagtcgaaaaatctcagctgtgcacagtggctcatgcttgtaatcccatctctttgggtggccaagggaggaagactgcctgaggccagcagttcaagaccagtataggcaacatagcaagagcccatctctaaaacaaaacaaaacaaaacaaaacaaaattagccaggtgtcgtggctggcacctgtgttccaacaacttgagagactgaggtggcaggaggattgcttgagcctaggagttaggggctgcagtgagctgtgatcgtgacaccgcactccagtctgggcaacacagcaagaccttgtgtcaaaaaaatttttttaattaaatataaaagagtttcatgacattcagagaccatccaaagaacctgtgggttccggccaggcacagtggctcacgcctgtaatcccagcgctttgggaggccatagcaggtggatcgcttgaggtcaggagtttaagagcagcctggccaacatggtgaaaccccatctcttctaaaaatacaaaaaattagtcaggcatggtggtgggtgcctgtaatcccagccactcaggaggcggggacagcagaatggcttaaacttgggaggcggaggttgcagtgagccaaggtcacaccattgcactccagcctgggcaacaagagcaaaactacatctcaaaaaaaaacaacaaaaaaaaaaaacaaaaagaacctgtggatgagttcccacatggcttcctaacgggctgcggctctcctaggagtctctcgctcatgggaaaggcacaaactgaatgcggaaggaaatcccattgctgtggaagtcccattgttaggaagctctgcttttctggagttcaaatttgcattcatgacgctttaaaccgtcagagctgggtgtgtcctcctacaacaaatcactttactctctctcctagttaacaggctttcaaatattagaacatccatgttctgacctcattaaaattgctcttttgtggaatgaaaagctctgatttaacccgtctttaagcctggtatgcatattcctctctgttccggccaccttgtctagacacactacactgaggcagtgcccatcttagatgatgttgatacattgtcaaaaaatgggcaaaccaggtgcggcggctcacacttgtaatcccagcacttttggaagctgatgccgacagataaccagaggtgaggaggttgagatcagcctggccaacatggtgaaacctgtctgtttttctgtaaaaatacagaaacaatgagctgggcgtgggagtgcacttctgtaatcccagctacttgtggggctgaggcaggagaatcacttgaaccgggaaggtggaggttccagtgagccgagatcacgacactacactccagcctgggcgacagagtgagactccgactcaaaaaaaaaaaaaaaaaaagtgccagacagcccaggtttggtctgatatgttcagaaaaaagcaaaacagtcacctctcaccttttcttttcctgcaatgatgccgtttaatacaacaagggctgtaggtctgcggcagaaatatcattcaagtgaaacagaagggctttcctggctggacacagtggtcactcctgcaatcccaacactttggttggctaaggtgggaggatttcttgcggccaggagttcgaggctgcagtgagctgtgatccaccactgcattccaggctgggcatcagagtgaggcctgtctctaaaaaaacccttcactccccaaaaaaagggattttcaaataccagcctttcagcatgaggatcacatggaggaacattaagacacagatgctgggacccagccctattgattgtaattaaaaaactgaggtgaggcctgatttagctccatcattggaatccattcagatttgaaattctctgagttggacagtgcaagagagatcctaaagaaagcaaagtcactgtggactgaaatgagctggcaaggttttctgagcgtggtgaaatatgatctgggcctcgcttgggagggctgtggccaggccttgagtccgtggctcagtgggaccttctgaaacagcctccaatccgtgcccccacttcatttgctagtggatgaccccctccagcggctttggtgctgatgggaataagtcaacctgcagcggaagttcagcccaagtttcagcccagcagcttctacacacctgtccgtggtctggtcatgctgccatctctgcggttctctgcggttctctgcggagtcgtggtttctgtaccttgaagagaacttcccctctgggacccagaaacccagtgaatcctcaggaaaaaagggaatgaaattactgaagacaactctgtggcggggagatggaaaagaggctctctctctttttttttcctaatattttgagacagagtttcgctcttgtcacccaggctgcagtgcagtggctccatctcggctcactgcaacctctgcctcccaggttcaagcgattctcctgcctcagcctcccgagtagctgagattacaggcacccaccaccactcccggctaatttttgtattttagggtttcgtcatgtttgccaggctggtcttgaacacctgacttcaaatgatccacccgcctctgcctctcaaagtgctgggaatacaggcataagacactgcacccggcctgtttttgttttttagagacaaggtctctgttgccttggctggggtgcagtggtacaatcagctctctgttgcctcggctggggtgcagtggtacaatcagctctctgttgcctcctgggctcaagcaatcctcttctctcagcctcccaagtagctgagactacaggtgcatgcctgtagtagatatagcatcttgctctgttgcccagactggtcttgaactcttggtcacaagcgatcctcttgccttggcctctcaaagtgctggaattacacgcgtgagccattgagcccaaccagataagatgatctttaagggcccttcccatggcaccataatccaagtcagcgagactgtggctatagcaagtttaacataaccagatacgctagtattatgggctgcatggtgtgccccccacccctaattcatgtattgaagccatgaccctccagaccttagaggtgaccttattggaaccagagtctttacagaggtgatcaagttaaaatgaagtcactagaggccaggcactgtggctcacacctgtaatcccagcacttcgggaggccgaggcaggcagataatgagcccaagagaccgagaccatgatgtccaacatggtgaaaccctgtctctactaaaaatacaaaaattagccaggcgtggtggtgtgggcctgtagtcccagctactcaggaggctgaggcaagagaatcgcttgaacccggaaggcagagattgcagtcagccaagatcatgccactacactccagcctgggtgacagagtgagactctatctcaaaaaaataaaaattaaaaaactaaaaacctacagtaccgccttttacataatgcaatggtttggtaagcacatgcaccccagggaggtagtggcagattcagtcaaccttcccagcagcgtggagacgcagtcaggcatagcaggtgttgatgtggtttgaacccacagcttggctcaaatccacactcccctacttagtaccgagtgaagccacttaccctctaagtgccttacttttcttttcttttcttttttcttttttcgagacagagtctcgctctgtcacccaggctggagtgcagtggcatgatcttggctcactgcaaacttcgccttccaggttcaagcaattctcctgcctcagcctcccaagtagctgggattacaggcgcccaccaccatgccgggctaatatttgtatttttgatagagatggggtttcaccatattgcccaggctggtctcgaactcctgacctcaagtgatctgtctgcctcggcctcccaaagtactaggattagaggcatgagccaccacacctggccacttttcttatctatatttgttatgtggatgacttgtgttaacgcaaataagatgctgctcgtcatctttaaagaaaataggtggcaacctgttatagcaagtcctgtttttatttgtacttatgaggctttaattaaacgctaagaattaaaatgcacataataatagactttacctcacaaactggcttcaaatattcgatgagacttacatgtattacttaaatgaggttaaatttaaccttttaaaaatgatttattgtggctgggcacagtggctcacacctgtaatcccagcactttgggaggccaaggcagacggatcacttgaggccaggagttgaagaccagcctgaccaacacggcaaaaccccatctccgctaaaaatacaaaaattagccaggcatggtggtgcacacctgtaatcctagctactcaggaggctgagacacaagaatcgcttgaacccgggaggcagaggttgcaaggaggtgagatcacaccactgcactccagcctgggcaatagagtgaggctctgccttaaaacaaagaaaaatgattttgggggatgatggggtgtcactgtgttgaccaggcttgtctcaaactccttgcctcaagcaatccacccacctcagcctcccaagtagctggaactacaggcgcatgccaccacgcctggctaatgtgtgtgtgtgtgtgtgtgtgtgtgtgtgtgtagaaacaaggtcttactgtgttgtttaagctgctctcaaactcctgggctcaagtgatcctcccacctcggcctcccaaagcattggaattacaggtgtgagccacctcactgagccctccacctttcagctgaacgcagaaaagtacaatcttttaacccaaagcgttcctcacacttagggtcaggaagagcccttcatgccctggaggcaactactaaccctctgctaaacactctgactctgggtgtgagaaacacacctactgtgccccacatatttttccaaatacaacttaatttagccttcacgacaaccctggagtgaaggatcattaactttatttcatagatgtggaaactgagactcagaggcaggaaatgacctccttctggaggctgcaaattctttgatgctcctttgatcaacaggtgggagctggccagaggtggtggctcacacctataatcccagcactttgggaggccaaggtgggaggattgactgaggccaggagtttgaaactagcctgggcaacatagcaagacctcatctctacaaaaaatacacaaattagcagggtgtggtggtgcacacctgtagtcgcagccactcgggaggctgaagtggtagcattgcttgagcccaggaggttgaggctggagtgagccatgatcaagccactgcactccagccgaggagatggagatagaccctgtctcaaacaacaacaaaaaaataggtgaggatcagccaggcatggtggctcacgcctgtaatcctagaactttgggaggccaaggtgggaggattgcttgaggccaggacttcaagaccagcctgggcagcctagcaagatcccatcccttaaaaaaaagtttttaggctgggcatggtcactcatgcctgtaatcctagcactttgggaggccaaggcaggcgggttgcctgagctgaggagtttgagaccagcctgggcaacatggtgaaatcctgtctctactaaaatacaaaaaattagccaggtgtggtgttgggcacctgtaatcccaggtactcaggaggctgaggcaggagaattgcttgaacccaggaggcagaggttgcagtgagccgagagcgcaccactccactccagcctggacaacagagcgagactccgtctcaacaaaaaaatgtttttaattagccagctgtgatgatgcatgcccatgtcccagctacttgggaggctgaagcaggaggattgcttgagcctgggaggtcaaggctgcagtgagctatgattgcgcccctgcactccagcctggacagcggagggagaccctgtctgaaaataaaaaaagaggtgggggcctatgaccccccctttaattttggcccaaccttagtaacaggatagtcattgagtagggcaaaagtgatgttatgatgtttttcagcctccaatttacagtctaaaacatgtcttgggtaaacacagcaagactccatctcaaaaaaaaaaaaagaaaaaaaatcagaagtgaacctgtagcctgtagtgtgttgccaaataaacttatttttagagatacttctttccattttctgtgaggtcatctgcagtttcacatggtagacagacttaggtgagattcttagcaacatagaatgaagagtaaagaggtttgtttatttcacaagggtttattgaaggcctacgatgtgttaaatgctgtaggaaatacccactgatttctcttttcatggaggtttcccgccttctcttaacgagtgatcaattaaactgtttactgggaacttgctaagttaatgaacacacgggatacattctttggatgagcagacattggttgggcagaggggcaagaggagagcagtttagacagagacctgcttatacactgtagtgtctaagagagcttgtgatgttcaggaaacagttgttcactgtgctgcaatataggggacggccagttgcggtggctcacacctgtaatcctagtgctttggaaggccaaggcgggcagatcacctgaggtcaggagttagaaaccagcctggccaacatggtgaaaccccatctctactaaaaacacaaaaattagctgagtgtaatggtggatgcctataatcccagcaacttgggaggctgagacaggagaatcacttgaacttgggaggtggaggttgcagtgagccgagatcatgccattgcactctagcccaggtgacagggtgagactctgtcaataataataataataataataataataataataataataataataatgtaggggacttgatgaagggaaaggatcagagagattctgaaaagaaggtagtttggggcccagtgatgactagattttaagtttcatatagtaggaagtggggcactagtaatttttcaagcagaaaaattatttgaccagattcgtgatttcaaaaatagctctggtgatagagtggaggatgggttggagcagggaataaggggaaatgaaaccgttataaaactcttaaagtgggctgggcatggtggctcacgcctgtaatcccagcactttgggaggctgaggcgggcggatcacgaagtcaggagatcgagaccatcctggctaaaacggtggaaccctgtctctactaaaaatacaaaaaattagctgggcatggtggtgggcgcctgtagtcccagccactcaggaggctgaggcaggagaatggtgtgaacccgggaggcagagcttgcagtgagctaagatcgtgccactgcactccagcctgggcgacagggcgacagagcaagaatccgtctcaaaaaaaaaaaaaaaaaaaaaaaacctcttaaaacaagtacagcaagaactttgagggtctttgctaagacagcagctggcagcttcaatttggagtagggtatcaaaggcaactgtgtataaggaatagttatataactggtatccaatttctgagatgattttgacttaaacattgtgtatttcccagcatactgttggtttttctaattatgtgggaaattatgttgcttttacttttttttttgctcattgcccagcctagggtgcaatgctgcaatctcagctcactgcaacctccgcctcccaggtttaagtgattcttctgcctcagcctcccaagtagctgggattacaggcgcccaccaccatgcctggctaattttttgtatttttggtagagacagggtttcacgacgttggccaggctggtctcaaactcctgatctcaagtgatccacctgcctctgtgtcccaaattgctgggattacaggcatgagccaccgcaccggccatgctttcagttttcaagaaagaagacaccattattgccaaagattttggtaatttgagagatacaatgtatgttttctccatgtggatactagatagtaaggatgtgttgaatttgaagtgtctatccagaagtattttgggtacttgtttaaggattgtaaaacaatgtttccatttctggatataataaatgtatttgttaatataataaatgaatagattagacccataaactatttgcagtgttgagtcatttcccacagttaaaatcaggatgaaaatatatagctgaatacctgctttgtttcttgtaactgatttctttagtacagaacctgctaaggccatcaaacctattgatcggaagtcagtccatcagatttgctctgggccggtggtactgagtctaagcactgcggtgaagaagatagtaggaaacagtctggatgctggtgccactaatattggtaagtttgggagagttttaagccacaagaaatgatcagtgaatgttgttgtagtcaagaaacatttgttattgaaataagactatcaagtgttgatgtagtaataaactattatttttaagttaaagttagcacctattatgtgcctagtacttagctaggtagtaataataataacgacagcttttcttgtgttcttatggtgtgccaggcaggtgttatgctaagaattgcacagaaatatctcatttaatttgcagaatagctgggcgtggtgtctgacgcctgtaatcctagccctttgagaggctgaggtggggggattgcttgaagccaagagttcaagaccaacctggccaacatggggagacctcgtctctattaaaaaataaagcaggccgggtgtggtggctcacgcctgtaatcccagcactttgggaggccaaggcgggtggatacctgaggtcaggaattcgagaccagcctgtccaaaatggtgaaactctgtctctactaaaaatacaaaaattagccagacctggtggcagaagcctgtaatcccagctactggggaggctcaggaatgagaattgtttaaatttgggaggtggaggttgcagtgaaccgagattgtgccactgcacgccagcctggggacagagcaagactctgtctcaaaaaaataaaataaaataaaataaaataaatcctggagtagtggctcacatctgtaatcccagcactttgggaggctgaggggggctgatgctttgaggtcaggagttcaagaccagcctaaccaacgtggtaaaaccctgtctctactaaaaatacaaaaattagccagatgtgatggtgcatggctgtaatctcagctcctcagaaggctgagggaggagaattgcttaaacctgggaggtggaggttgcagtgagccaagatcgattgtgccactgcattccagcctgggtgacaagagcaaaagtccatctcaaaaaattaaaaaaaaaaaaaaaaaaggaaagaaaaaaaagaaaatgacaaaattaaaaaaaaattattaatctgccaaataactttatgagatagaacttattacctccattttacagttgaggaaattaagggacagtaaatttcctttttttgagattataaagctaataaaatagaatctaggaagtctgattccagaaccagttctgtttttttttcttttttttttttttgagatagagttttgctcttgttgccgaggctgcggtgcaatggcacgatctcaactcactgcaacctccacctcccaggttcaagcgattctcctgcctcagcctcacaagtagctgggattacaggcatgcaccaccacgcctggctaattttgtatttttagtagagatagagtttctctacgttggtcaggctggtctcgaactactgacctcaggtgatccgctcgctttggtctcccaaagtgctgggattacaggcatgaaccactgcgcccggcccccgttctccttactgggtatgttaaaattatttctttcaaaggaaaaggctggtcaaagtgcaacggtctttacaactaattgatcacaaccagttacagatttttttgttccttctccactccaactgcttcacttgactagtgtaaggaaaaaaaaaagaggaaagaaagaaaatgctaaactatttaatctgggctagtaaatggccagaaagaactttataaaaatgaaatatacaaaatgacactagtatgtttaactaaaggtatagttacgacacttaaatttgcacgttataaataatatcaatataaaaactgatagcgtgggtccatttttaataaatatataaatattttaaactttctagatctaaagcttaaggactatggaatggatctcattgaagtttcaggcaatggatgtggggtagaagaagaaaacttcgaaggcttaagtaagttaactttctaatcctattacaaaataattgggccacatgtcttagaattttgagtaacactgtcttgggaaacacaaaaacagttttttaaagccagttactagatatcatgtatatttgttgttatagcacttgagatatcttagtccttactttacagtctctttcagctctgaaacatcacacatctaagattcgagagtttgccgacctaactcgggttgaaacttttggctttcaggggaaagctctgagctcactttgtgcactgaggtgagaaaatatttttatccattcacttgaccccttagaaaaacctctctgaaaattaattggaatcattattatttacaattttctatctcaatatctcagcttctagcttctgaattctgttttgtctcactgccaatctaagtcctagtacttctgaaatgtgagcaataaatgaatgaaatgaagcaaatagtattctttaaaaaattggttacccttattaaaacagtaacttctcaatttgaacataacatatagataataaatgatagttaccattggttttcattatcaatttttagggaaacatttcaccaaagcactatttaattacagcacagatactaaatttttataaataattacatgcacacacacatatatagacatatatatacatatatatacatatatatacatatatatacatatatacatatatatacatatatacatatatatacatatatacatatatacatatatatacacatatatacatatatacatatatatatacatatatacatatatatacatatatacatatatatatacatatatatacatatatatacatatatatatacatatatatgtatatatatatatatatttttttttttagacagagtcgcactctgtcacccaggctggagtgcagtggcacagtctcagctcactgcagtctctgcctcccaggttcaagtgactttcgtgactcagcctcctgaagagctgggactatagcgtgcaccaccactcctggctaatttttgtatttttagtagagatggggttttgccatgttgcccaggctggtctggaactccaggcctcaagtgatctgccctccttggcctcccaaagtgctggaattacaggcacgagccaccgcaccctgccctacatatacattttaattataatatcttttggattctttaaaaaaaattttaaaaattttaaaaaattctttaaaaaaattcttttaaaaaattttgtttgaagagtaataacaaaacaaatctctatttgagaatcaataaatcttgagatcatttatggttttgcaattcaacctgaaaaatgaagtcaaagcttttatcaaaacaaagcatgtttagtgctctctgtctcactgtcttttagatgccagaccttagattttgtgatgactcctcaaccgtttagatctcggttatctcagagggatcatcagctttttaagaaaattttgagagaaaagcaagtgaagaaaagagtagtcagtgcccaacatcatggatctctcactgaacacaccatgcctggtattctctcacagtgatgtcaccatttctacctgccacgtatcggcgaaggttgggactcgactggtgtttgatcacgatgggaaaatcatccagaaaaccccctacccccaccccagagggaccacagtcagcgtgaagcagttattttctacgctacctgtgcgccataaggaatttcaaaggaatattaagaaggtacagtaaattaatcctggttttcaagagtattggttaatgcacatgagcaaaagatttactaaagatgtttattcttcagttgattctcttcccataatttattgagaaatgctttatttgcatttctcattaaagacttaacttcaggatgatttacttttttctttttatcacataatgtttattaggactgggaaacatagtgagactctgtctctatgaaaaattaaaaaaaaaattgactgggcatggtggcatgcacctgtagttccagctacttgggaggctgaagtgggaggatcacctgagcccaggaacttgagactgcagtgagctatgattgcgtcactacacttcagactgtgagacagagtaagaccctgtctggaaaaatatatatacatatatatacattttttttattttttatttttatctttttttgagatggagtctcactttggcgccctggctgcagtgcagtggcgcgatctcagttcactgcaacctccacctgccaagttcaagcgattctcctgcttcagccttctgagtagctaccattacaggcgcgcgccaccacgcccggctaatttttgtattttcagtggagacggggttccaccatgttgtccaggctggccaggctggtcttgaattcctgccctcaggtgatccgcccacctcggcctctcaaagtgctgggattacaggcgtgagccaccatgcctgaccttatgtacttatatttttatgagaatatttctcttggttttctgataaatgagttactggaacccttatgaatttgaatgcaaatgaaacagctaaatgttatataattgttgtgtttaaaaagcagattataaaactgtctgtattatatgattacagttttataaaaacaaaacaggcctaaatgtgtatagtataaagactgaagagtcagcacttccatgttctcagcggttatccttggatgtgagatctcatgcactttttgctctcttctttgtgcctttccattttgcatgcgtatttcttataatctaaaaagttacttaaacatatgcagctaaaaactttttttacttgtaaagcgtttggtgctaattttaacttttttttttagacggagtcttctcactctgtcgcccaggctggagtgcagtggtgtgatcttggctcactgcaacctccgcctcctgggttcaagtgattctcctacctcagcctcccaagtagctgggattataggtgtgtgtcaccacacccagctaatttttgtatttttagtagagatggggtttcaccatgttggccaggctggtcttgcacccctgacctcaagtgatctgcccacctcagcctcccaaagtgctgggattacaggcgtgagccaccacgcctggcttttttttttaaagcttttttgtaagtcagccagcaagaacacaggaggaagtactcaaatctcccttacacagctgggggctgtgtcaggttttataagcatagggtaatgaggtgtgatttgattggatcttgcaataaagtaatgctgggaggtgtgatctgactggatcctgccatggggtgacaccaaaactcaatctgattggatcctggctcctgcctgggggtgtctggttcttaaatcggtccgagctcttcaggctgagctcttaggttccactccacggtggcacgcgtggttaacctgggcatgcacagggtacatgaccttcaacctgcaggtcgatggcaattggaaaacaactgacaacttcattacataaaagttgaactgattcgggtgcggtgactcacgcctgtaatcccagcactttgggaggccaaggcaggtggatcacctgaggtcgaggagttcaagaccagcctggccaaaatggtgaaaccccgtctctactaaaaatataaatattagccaggcgtggtggcgcacccttgtaatcccagctaccccagaggctgaggcagcagaatgcttgaacctaggacgtggaggttgtggtgagctgagatcgtgccattgcactccagcctgggtgacaagagtgaaactccatcaaaaaaaaaaaaagttgaactagatttggtctgatgcagttacagatttacaaaccgcgtcccaccctcctgccaacaccttccactcctcattcttgagggattagggatggaggtcatgcttctgtatcgacttcatgctgaccaggggcacttagtcccctaaagtgagaggaatgaaactcttgggcttctgagttcagatgagttctggggtcacccggagtagcttgaaaggctggtattgttgtaatacaagctgaaggtggaagtgttggatcctggaggacaaacagctcaccatccatttaaataaataggaccaaaaagtaacagaacagtggccacgaggggccccaacagaggaagaaaccaggtgaggtgtggtatagtggactcgactgccttctaaatctcagtggttgtccgggtgcggtggctcacgcctgtaattccagcaaaagaagagccgaggcagggtgatcacgaggtcaggagttcaagaccagccgggcaaacatggtgaaaccccgtctctactgaaaatacaaaaattagccaggtgtggtggcgtgtgctgtagtcccagctactagggaggctgaggcaggagaattgcttgaacctgggaggcggaggttgcagtgagccgagattgtgccactgcactccagcctaggtaacagagcaggaccccatctcagtcaatcaatcaatctcagtggttgaactacccttgatatggttcagctctgtatccccaaccaaatctcatgtccaattgcaattcccagtgttgagggagggacctggtgggagatgattggctcatggcggctgacgtcccccttgctggtctcgtgatagtgagtgagcgctcatgggatctggttgtttagaagcatgcagcacctcctgcttcactctctctgtctctcctgctccaccatggccagaaacgtgcctgcttccccttcgccttctgccgtgattgtcagtttcttgagggctccccagccatgcttcctgtacagcctgcaaaactgtgagtcaattaaacctcttttcttcataaattccccagtttccagtagttctttatagcagtgtgaaaacagactaatggacccttctggttgaaggaatgtagccattctgcttgtttaagtatttcctttctattcatctctatttcccgggaggtgtttatccaagtgcaataggagatattggtgactgcagagtcccctcagtgttctgctagtaaatagttgaaggttgatcagtgatctccagcattttcagtctggcatggaaaagcccccatgtaactggtaaaggtatcagtaagcaccaggaggtatctaaatccaccaggagccataggcatcatgttgatgtccatttaccagtcttccctggcaagattctctgaattgtactgccttggccaaaagaggtatgggaggggctgggcacagtggctcacgcctgtaatcccagcattttgggagaccaattcgggtagatcattagaggtcaggggttcaagaccatcctggccaacatggtgacattccatctctactaaaaatacaaaaagtcagcggggtttggtgttgggtgcctgtaatcccagctactcgggaggctgaggcaggataatcacttgaacctgggaggaggaggaggtggcagtgagctgagatctcgccattgcactccagcctgggcaacaagagcgaaacttcatctcaaaaaataaaaaaagaagtctgggtgtggtggctcgtgcctgtaatcccaggactttgggaggccaagatgggtggatcatgaggtcaggagttcaagaccagcctggcctagatggtgaaaccctgtctcgagtgaaaatacaaatattagctgggcatggtggcacacacctgtaatctcagctactcagaagtctgagacagaagaattgccaaaacccgggagggagaggttgcagtgagccgagatcgcgccactgcactctagcctgggcgacagagcaagactccgtctcgaaagaaagaaagagaaaggaaattccccagggaagtacctcggcttatttcatgaagaggtactgaaggaagcagaggcatgtggaggacttccccacctcgtgcagctatttgggccgtggcgtctgaaatttcttatttcagagtcacccctttgatgaccttggcagtggactgcagtcatctgtttaggcctctccatggcccgtgtcaatgccgatatttctgtctgttgcacatttgatttccttgctgttggcatttagaaggccccctgtttcccagatcacaccacgggcatggaccgcagagattgcatcttgtgagtctgtagaaacagtcaaggccttgtcctctcttaggtccagagctcaggtgaatgcagattttcccggccatctgtgctgaagtccctgtggggaggctcctggctggtttcctgtaggtagacagctacacatcctgcccttcattggcttcttttcatgaagctcctgctgtctacaaaacatgtctcccttttcttcttgaaccacatctctgttattgaaactctagaagtcagccaggcacagtggctatgcctgtaatcccagcactttgggaggccaaggtgggtggatcacctgaggtcaggagttcaagaccagcctggccaacatggcgaaaccctgtctctaatacaaatactaaaattagccaagcatggtggccactgcactccagcctgggtgacagagcaagactctgtctcaaataaagaaagagaaagtatcatgcttttcagagttctgtgggttgttatggtgaattatcaaacctgaggacgtggtgggaacctccaaatttgcagccagttggtgagaagtacatgcggtctgtggacacccaagcttgcagctgcatctgaagcgagggcagcctagcgggggctggtggccttaacctgtggcatttgatgtaacatcagggagttgacatcagaattacgtcacacaggccaggtgcagtggctcatgcttataatcccagcaattagaaaggcaagataagaagattgcttgagcttgagtctgagcccacagtgagctatgaccgcaccactgcaccccagtctgggtgacagcacaagaccccgactccaaaaataaaaaagaaaaatcacaaagaattgcatggcagagtgcctgtctttcacagcttgaactgttgcaggaactttctttttttttttttcttttgtgatggagtctcgcgctttcacccaggctggagtgcagtggcgcgatctctgctcactgcaggctccgcctcctgggttcacaccattctcctgcctcagcctccggagtagctgggactacaggcgcctgccaccgtgcccagctaattttttgtatttttagcagagatggggtttcaccgtattagccaggatggtcttgatctcctgacctcatgatccacccacctcagcctcccaaagtgctgggattacagtcctgagccaccgcgcctggactttttttttttttttttgagaggggttggggagacatattctctgctagtgattctcctgcctggtctcgaactcctgctgggatcacaggcgtgagccaccacgcccagccacctttagagttttcttaccacctggttttcctctctcaatatctttctctcatttcctgctttaaaactctagcttggggtctgggcacagtagctcatgcctataatcccagcactttgggagactgaggcgggtggatcacttgaggtcaggagtttgagaccagcctggccaacatggtgaaaccttgtctctactatttttacaaaagttagtcagacgtacaggcggatgcctgtagtcccagctacttgggaggctgaggcaggagaatttgcttgaacgccgaggtgaaagttgcagggagccgaggttgtgccactgcactccagcctgggagacagagcgagactgtctccaaaacaaacaaacaaacaaacaaaaaaaaaaaccctgtagcttgggatcagccttctcttctgttgtttttctttaaaaaataaaaattaaaaataggcttcaagtgatcctcccgccatgacctccaaaactgctgggattgtaggtgtgagcactgcacccagccgtatgtttttttctacataaaaaacagcacaggattatcttccaaagctaacaaatatgttcaaataaccacaaccccattaaggaaaaatgtcacttgacagcaaataatcaatccagaccacaatatgatcacactcactgtgaaggtgagaaaagttcatctttattatgtttccccaagagatgcactgcactgttctcttgaaaacacacagctcatgtcctcctttagaacacacatcctctttaaagtaacatacaaacatgccaaaacaagataaaaaattccatctgaattctcacatttcaaacatacactaaatatcaaataaaaatttatttttacaagaatttaggggaactaccacatagctataaatgtaatatatatgttaactaagtatcatagataaaaaccatgctcccttcagcagcacgtgtaataatagatacaaagattgaaaggtaaaagatttaggatgaaaagaatcctctcttaaaaaggaaaacaaaattatatgtatgtgtatacaacagttataatacccatcacacagctttatagaaacagcatctattcaaaaataccagtatttccaaaatatttaaaataatatttaaagtaataataatatttaaataaataaatatatttaataaatatttcagtaaataaaataatatttaaataattctatacccatgtttttcaaaataaaccaataaaatagatagtatatattagacgtgttagtatatatatctgagacatgttaaaaatcacaactgaattctcacaagtcagtcacaaacctaaacagcaaataaaaatttctatcaccagaattatgtttttttctggtggggaactaccaatagctataaatagaagagattattatggaagtatcatagataaaaagagtgctcgcttcaggagcacatataataatacagaaaaaaatttaaagataataaaagatttaggataaaaagaattctcacttaaaaatgaaaagaaaattatctttaggtatatataacaactataactctcatcaaaaaactctacaggaacagcatgttttcaaaagtacaacaatttccaaactatttgaaataaacctattaataattcaatggccaacattttccaaacaaaccaataaaatgcatagtgtgcatgaagctatctgttacagtctgtggcactcatatttcacaaagaattctgtgccaatctgagcccctgcactgtgccttcaaatgctcctggactgtggcaaccaagtccataagaaacaggacctccaggttccgccccagggaggttggcattcagcaatataaaaagggaggtggtgccgcaggaaagggtggaactggaaacactcctggtttcttacttttctccaaggactcctagaagtaccccaccccacccctgctccttggaggacaacgtgatcactgtattcagctctgtcaagaatggtccaggttcttctagatgatctgcacaaatggttcctctcctccttcctgatgtctgccattagcattggaataaagttcctgctgaaaatccacatctcccctgggtccggtgttctggaagtgagagagacaatgtcacacttcaaggaggcagctctctagacaggaaggttattcacgtcccatgtcaagtctagctagagttcagagcaattgagaagtgcaattttatctcctgcctttcattctataccctgcttctgaaccatcgtgttcaactgtgaaactcacactttggtgaccctgactccaaaacttaatacacccaaggtcagccccagtgatctgcttcatagccaggactttgggtgggtcttcccagggagtagggcaccctcagagaatgtggctttggacttcatcacagctggggccttttgtgtcacttcagatctaaacttgtaaccgtgctagatctgtttctaacgtgacagcatcacgaaccatgagtccagaagcctaatccataatcctccctcctcatgacgaagtctcatgctctgtgctcaacatggttagctgcacaagatgtaaaccaaagcttcactgaaccctcgacccaaatcggtaactcaagtgcatcaatcataatgaacctccccgaactcagtatttatgattatttttgaggcagggtctcactctgtcgcccgggctggagtgcagtggcaggatcagggctccctgcagccccgacctcccaggctccagcgatcctcccgcctcagcctcctgagtagttgggagtagagatgcctcccacatcgcctggctaatttttgtatttttgtggagaggggatctcgccacgttgcccaggcttgaagccagatcaagcaattgggttccttggatttccgaaatagaccccaatattctgcctttaccccggaggatgcagatgtaccttctctcaggccgatgacctcaggcctccacggtccctggagctctaggaaaggtgggcgcgatctcgcgcccacacccagtgctctgggtcataagcctggatctggaaaaacaaacgcgctttgagaagacggggactccccaggatacccctctctcccctcgtccagcctccagcccacccgattcctccccacatcctccacgtccccaggccccacccacctcttccaactcctccagggaaacccaagccctgcagcgcatggaacaaaagaagtggaaccgatacttccggaacaaggctatctgagagcagttcttcctggccctcgggttcatgtaacggcataactggaaccaaagctcactgagcaagggtatatgagagcgggtctcctcgtacaggaagtagaagatgttttgtttgggggcctcgtcgtcctcctccatgtcattggccagatagctgaggacagaaatcaggttgctgctcaggggcaccaccaggagagacctccggctgaggtcagcttctcagagaggaaggtaagggaccgtccctagctcaggactggcacccaccctgcagagagccacgccttcctcaggagggctctgctggacagagacctgatcaagggcgtctcccactccttcaggatggagacaaaaacccaactggtgaccaagagtggtggcttatgcctggaatcccagcacactgggaggccgaagcaggaggatcacttgaggccaggagtttgagacaggcctgggcaacatagcaagaccctcgtctctattaaaaatataaaaaatacgccagacgtggtggctcatgcctgtaatcccagcgctttggaaggctgaagcaggtggattgcttgagaccaggagtttgagaccagcctggtcaacacagagaaaccccatctatactaaaaatacaaaaatcagcctggtgcggtggcacacccattagtcctagctactcaggaggctgaagcataagaattgtgtgaacccaggaggcggaggttgcagtgagccaagattgggcccctccattccagcctgagagacacagcaacactcttgtcttgataaataaataaataaataaataactgtccaggtgtggtggtacagccctgtagtcagagctaatcaagaggctgaggtgggaggatcgcttgagcccaggatatggaggctgcggtgagctatgatctcaccactgcactccagcttaggggacagggcaagtctgtctcaaaaaaaaaaaaaaagcaattgaatacactgatattttgccaggaccctgccttctacaggcatctagtctaatgggactgggagtaatcaggggagatgacctaatcccaatgtcacattataataggatgtaactggagagctacgggcatgcagaagttggaagacgagggaaggcatcacagaggctgtggggtgaaccgacttcaaggaatgggtccttcccttcagaaccacatgtgtgcgggacacccagacagaaaacacaaatgcaaagtcaagtggagggcatttggaaggagcagtgaagccaagccaggaaacaccaagatggcgagccagtgtggttgtagagattgtagagagggtggaattggcactgtggaccctggcctcgatagagaaagacatcagctaaggaagttgttcaggtgggcagtgaggttgtcgtgctttggaaagatgttcaggctgcactaggaagccccctggcttggggagagactccaggaaaccccagcagggagcatttgacagtggattcgagtgatgcaagggggacctggactgtgacctctgtcacgggaacccggaggaggctgatggcttttgcggttgatgtgggaaggagagagaacaaccggaaacgtctgcttgctgggggaagtgtcatgtccgctcctccgctccttttcttctccccttaggagcggttcatggttccttttgttttttgttctttttttttttttttttgagactataatcctgtcttttttgtacacagagtaaagaggacaaataggtgaaagaataaatgaaaggctggaatcccacttcccccgctgtcccagggcattggatattgacggataggaggcagcaaaccactcacagagccaggaagaaatgaatgcgttggtattgccaggaggggaggccggcccggctgaaatacgctatgaccatagccaggagatactgatggagagaaaggaacacagagagggagaggtcacatcttgggagaggaagattgtggatatagtggaatgggggtctggggaggggttgcccatcagagaagggacctcagtgttggggtgactgtgctcatgtggaaattgcggggtggaggggtattcgaaggtcggatgcaaatccgagaagccggaggaagggtttttggtgatgctcccaggatggtgggctccgatgggatctttggagggggtgtgtctaggtcggctggtgtcaggagggtcttttgtgtgccaggcagagaactgtcccaaggagctgagagtagagggcccaggagcttcagggctgcagccagactgtggcccagggctcagatcccaaaggacccataggagaggcaggggccactcattcactctgcaagagaccagcagaatcctgacggagatgctgacaaatcataaaaagacaaagaatagccgggagtggcagctcaagcctgtgatcccagtactttttgagaggtggagacaggaggatcatgtgagcccaacagttggagaacaacctgggcaacacagcgagaccctgtttctaagaagatttcaaaaattagttgagcatggtagcatgtgcctagtcccagctcctcaggaggctaaggaaagaggattgcttgagcccaggaattagagtgagctatgatcatgccactgtactccatcctggggagcagagctggactctgtctcagaaaaaaaaaatgtgtgggtgccaagactcaagaccatgggagctggtcagacacagtgctgacgtctgtaatctcagcactttgggaggccaaggcgggtggatcacctgaggtcaggtgttcgggaccaatctggccaacatggcaaaaccccgtctctactaaaaacacaaaaattagccaggcgtggtggttcatgtttgtaatcccagctgcttggaggctgaggtgggagaatcgcttgaacccaggaggcatcagctgcagtgagtcaagatcgagacactgccctccagcctgggcagcagagcaagactgtgtctcacaaaaaaaaacaaaaacaaaaacaaaaaaaaactgtaggagcatctggtgggaggtggtggacggagaactgtgggtttggaagctgcgccctccccctggccgtgcgttagaacaggaacacagttacatagagaacaaccttaccttgtccgacaccctcagatctttgtcccaggccaggagtcttttaatgacaggatcctctgtgattagagagcagatgtcagtgtgagaagcaggacagggtttccgtgagagcagcagggcagcgaggagaagtgtgcctcccgggggaaagtctcaggattgtggccgcgggtgaggtggatgagagaggggagaatgactttcactgggcaagggagagaggctcctgctctgagactcccctgagaagaggccgaaggaggccctgggtgtgagaatctacaggatgtagagctgggaatcagccaggaccccctccagcagacacagagggaccactgcagagtcataaaggaattcccatcatttcctcatgagacagtcacacatcagggtgtgaccatggccttgggatccctcactatggatggagacacttaggtttagaaaagtcagtaagaaacattaagtttcagagggcacagctgaaaccacttttttgatttttgattttgtttttctttatttgatttttatttttatttatttattaatttattttgagacaga

SEQ ID NO: 1814 - DNA, 4713 bp, Homo sapiens
cagactggagtgcagtagcacgatctcggctcactgcaccctcttcctcccaggctcaagcgattctcctgtctcagcctcccgagtagctggaactacaggcatgagctactgtgcccagccttggtttttcttttgacgcagagttttgctctgtcacccaggctggagtgcagtggtgcagtcatagctcactgcagcctcaaagtcctgagttcaagcaatcctcttgcctcagcctcccaacgtgctgggatctcaggcgggagccacagcgcctggcccaaaaccaagctttcttatcccaagcaccgacctttatcaagtctacctaatcctctgttgtctcctaagtgtccctcatgagtgatcacttcagagtcctcccgcatggagagctcacccactggggcatatttttcccattggaaaagtgtggttattggaagtttcctctttttagaaagaacaggattggaggtgctctctggggtgtcctcctaccaagcagcctgttgaaggcctcgtagtactcagggagcacgagcgacactcgccgtcgcttcgccttcatcttgaggccacacagcgtctccgccacccaggtctcctcaggctcaggggcgagctccttctctggctcatcatcagattcatccaaacactccctcttccttttgcagccaagggacctacgtggggggctgggatctaccccaggggctgagtaaagaaaccaggccaccgtgtaatgcttctgcaactgatcacgttagaccccgaccccaaaccccaaaccattctccatcctccccagcctctcagactgctggcttctccaagccacctttctgactttctcctctgctcaaccccatgtgccactccttcccctccccattcttccctctctctgtcctcagaacactgcgtcatatcgttccctggtccctggctctctgaggccctctttttttttttttgtttcgagacagaatcttgctttgtcacccaggctggagtgtagtggtacaatctcagctcactgcaacatccatctcccggattccagttattctcctgcctcagcctctcaggtagctgggattacaggtgcctgccataatgcccagctcaattttgtacttttagtagagacggggtttcgccatgttggccaggctggtctcaaactcttggcctcacgtgatccgcctgccttggcttcccaaagtgctgggattacaggtgtgagccactgcacccagcctgaatttctccattcttcccacacaccctccccaggttctccttcctgacctctgacccttcttttttttcttcttctttttttttttttttttttgagacagcgtctcactctctcacccagactggagtgcagtagcacgatctcggctcactgcaccctcttcctcccaggctcaagcgattctcctgtctcagcctcccgagtagctgggattataggcacacaccactaccgcctggctaatttttgtacttttagtagagatggggtttcaccatgttggccaggctggtcttgaactgctgacctcaggtgatctgcccgcctcggcctcccaaagtgttggtgttacaggggtgagctaccgcacctggcccccttccttcgtcttagtcaatcctatgccacctcttcttcctccagtcccctcacctgatggtcccgacacttcatcatccaccacctcctggagggggtaccctgaggtgctccgctgggggctctgctcttcctggggctgcggttgatggctcgtcatgatctttcccaaaatctgtccaatctcaccgaagctagtctctgttctgtccttggtcttcttctggacactgctgggatccagaagagtgtgttatcaattctcgaggctgggagaagtcaggagtggagaacagctctgagaagttactgttgttcacctgaactgccaggcgccgacagagtccggtccttccaatcaggaaggtcggaatctctgatgtcataggtcattccaacctggcaaccagtttgaacaaaaacacatgtaactgccaggctgatctcttgtcctggagatcctgggtgaatggtatctcctgccactgtcccaacctcagaccactgtccaaaagcatcttcagggtctccgcatccctctgttccctgtcccagcagaggctgtgtcctctccactcaaagcttgaagcgtgttggggtctcctcttctctgtacatgcccgtttcagagtccagtctggtgggagagggatcaggatgggaaagaaaactagggtaagcagaaacgatgaaaccttataagagtgagagtatcatgtacaagagatcccaggaacattgacttgatgaaaaagtcacatcagagcactcaatttggcagagcttttctgccgaatgtttactgatattcactgtccgagattctgtactgggtgtaacgtgtcctctgccctaaggcatctttgagtccaagagatattttgaggactggaaatcatcggaaactgcccatgagctcacacatatttccaatggtgtccccagtttcagggagtccacggatcacctaaagccagcccctccagtttggctaagaaactctatatatcaagttttgtatcatatgtattgctcttaactcagaaattccaccatttatagcagtggtttatttatttatactattgaaggaaatggtttatttatgaatctatattatggatattctataagatactgggtgtacaaaaagactaagtcgaaaaatctcagctgtgcacagtggctcatgcttgcaatcccatctctttgggtggccaagggaggaagactgcctgaggccagcagttcaagaccagtgtaggcaacatagcaagaccccatctcaaacaaaacaaaacaaaacagaacaaaattagccaggtgtcgtggctggcacctgtgttccaacaacttgagagactgaggtggcaggaggattgcttgagcctaggagttaggggctgcagtgagctgtgatcgtgacaccgcactccagtctgggcaacacagcaagaccttgtgtcaaaaaaatttttttaattaaatataaaagagtttcatgacattcagagaccatccaaagaacctgtgggttccggccaggcacagtggctcacgcctgtaatcccagcgctttgggaggccatagcaggtggatcgcttgaggtcaggagtttaagagcagcctggccaacatggtgaaaccccatctcttctaaaaatacaaaaaattagtcaggcatggtggtgggtgcctgtaatcccagccactcaggaggcgggggcagcagaatggcttaaacttgggaggcggaggttgcagtgagccaaggtcgcaccattgcactccagcctgggcaacaagagcaaaactacatctcaaaaaaaaaaaaaaaacaaacaaaaagaacctgtggatgagttcccacatggcttcctaacgggctgcggctctcctaggagtctctcgctcatgggaaaggcacaaactgaatgtggaaggaaatcccattgctgtggaagtcccattgttaggaagctctgcttttctggagttcaaatttgcattcatgacgctttaaaccgtcagagctgggtgtgtcctcctacaacaaatcactttactctctctctctcctagttaacaggctttcaaatattagaacatccatgttctgacctcattaaaattgctcttttgtggaatgaaaagctctgatttaacccgtctttaagcctggtatgcatattcctctctgttccggccaccttgtctagacacactacactgaggcagtgcccatcttagatgatgttgatacattgtcaaaaaatgggcaaaccaggcgcggtggctcacacttgtaatcccagcacttttggaagccgatgccgacagataaccagaggtgaggaggttgagatcagcctggccaacatggtgaaacctgtctgtttttctgtaaaaatacagaaacaatgagctgggtgtgggagtgcacttctgtaattccagctacttgcggggctgaggcaggagaatcacttgaaccgggatggtggaggttccagtgagccgagatcacgacactacactccagcctgggcgacagagtgagactccgactcaaaaaaaaaaaaaaagtgccagacagcccaggtttggtctgatatgttcagaaaaaagcaaaacagtcacctctcaccttttcttttcctgcaatgatgccgtttaatacaacaatggctgtaggtctgcggcagaaatatcattcaagtgaaacagaagggctttcctggctggacacagtggtcactcctgcaatcccaacactttggttggctaaggtgggaggatttcttgcggccaggagttcgaggctgcagtgagctgtgatctaccactgcattccaggctgggcatcagagtgaggcctgtctctaaaaaaaacccttcactccccaaaaaaagggattttcaaataccagcctttcagcatgaggatcacatggaggaacattaagacacagatgctgggacccagccctattgattgtaattaaaaaactgaggtgaggcctgatttagctccatcattggaatccattcagatttgaaa

SEQ ID NO: 1815 - DNA, 20991 bp, Homo sapiens
gggaaaatcatccagaaaaccccctacccccaccccagagggaccacagtcagcgtgaagcagttattttctacgctacctgtgcgccataaggaatttcaaaggaatattaagaaggtacagtaaattaatcctggttttcaagagtattggttaatgcacacgagcaaaagatttactaaagatgtttattcttcagttgattctcttcccataatttattgagaaatgctttatttgcatttctcattaaagacttaacttcaggatgatttacttttttctttttatcacataatgtttattaggactgggaaacatagtgagactctgtctctatgaaaaattaaaaaaaaaattgactgggcatggtggcatgcacctgtagttccagctacttgggaggctgaagtgggaggatcacctgagcccaggaacttgagactgcagtgagctatgattgcgtcactacacttcagactgtgagacagagtaagaccctgtctggaaaaatatatatacatatatatacattttttttattttttatttttatctttttttgagatggagtctcactttggcgccctggctgcagtgcagtggcgcgatctcagttcactgcaacctccacctgccaagttcaagcgattctcctgcttcagccttctgagtagctaccattacaggcgcgcgccaccacgcccggctaatttttgtattttcagtggagacggggttccaccatgttgtccaggctggccaggctggtctcgaattcctgccctcaggtgatccgcccacctcggcctctcaaagtgctgggattacaggcgtgagccaccatgcctgaccttatgtacttatatttttatgagaatatttctcttggttttctgataaatgagttactggaacccttatgaatttgaatgcaaatgaaacagctaaatgttatataattgttgtgtttaaaaagcagattataaaactgtctgtattatatgattacagttttataaaaacaaaacaggcctaaatgtgtatagtataaagactgaagagtcagcacttccatgttctcagcggttatccttggatgtgagatctcatgcactttttgctctcttctttgtgcctttccattttgcatgcgtatttcttataatctaaaaagttacttaaacatatgcagctaaaaactttttttacttgtaaagcgtttggtgctaattttaacttttttttttagacggagtcttctcactctgtcgcccaggctggagtgcagtggtgtgatcttggctcactgcaacctccgcctcctgggttcaagtgattctcctacctcagcctcccaagtagctgggattataggtgtgtgtcaccacacccagctaatttttgtatttttagtagagatggggtttcaccatgttggccaggctggtcttgcacccctgacctcaagtgatctgcccacctcagcctcccaaagtgctggggttacaggcgtgagccaccacgcctggctttttttttttaaagcttttttgtaagtcagccagcaagaacacaggaggaagtactcaaatctcccttacacagctgggggctatgtcaggttttataagcatagggtaatgaggtgtgatttgattggatcttgcaataaagtaatgctgggaggtgtgatctgactggatcctgccatggggtgacaccaaaactcaatctgattggatcctggctcctgcctgggggtgtctggttcttaaatcggtccgagctcttcaggctgagctcttaggttccactccacggtggcacgcgtggttaacctgggcatgcacagggtacatgaccttcaacctgcaggtcgatggcaattggaaaacaactgacaacttcattacataaaagttgaactgattcgggtgcggtgactcacgcctgtaatcccagcactttgggaggccaaggcaggtggatcacctgaggtcgaggagttcaagaccagcctggccaaaatggtgaaaccccgtctctactaaaaatataaatattagccaggcgtggtggcgcacccttgtaatcccagctaccccagaggctgaggcagcagaatgcttgaacctaggacgtggaggttgcagtgagctgagatcgtgccattgcactccagcctgggtgacaagagtgaaactccatcaaaaaaaaaaaaagttgaactagatttggtctgatgcagttacagatttacaaaccgcgtcccaccctcctgccaacaccttccactcctcattcttgagggattagggatggaggtcatgcttctgtatcgacttcatgctgaccaggggcacttagtcccctaaagtgagaggaatgaaactcttgggcttctgagttcagatgagttctggggtcacccggagtagcttgaaaggctggtattgttgtaatacaagctgaaggtggaagtgttggatcctggaggacaaacagctcaccatccatttaaataaataggaccaaaaagtaacggaacagtggccacgaggggccccaacagaggaagaaaccaggtgaggtgtggtatagtggactcgactgccttctaaatctcagtggttgtccgggtgcggtggctcacgcctgtaattccagcaaaagaagagccgaggcagggtgatcacgaggtcaggagttcaagaccagccgggcaaacatggtgaaaccccgtctctactgaaaatacaaaaattagccaggtgtggtggcgtgtgctgtagtcccagctactagggaggctgaggcaggagaattgcttgaacctgggaggcggaggttgcagtgagccgagattgtgccactgcactccagcctaggtaacagagcaggaccccatctcagtcaatcaatcaatctcagtggttgaactacccttgatatggttcagctctgtatccccaaccaaatctcatgtcaaattgcaattcccagtgttgagggagggacctggtgggagatgattggctcatggcggctgacgtcccccttgctggtctcgtgatagtgagtgagcgctcatgggatctggttgtttagaagcatgcagcacctcctgcttcactctctctgtctctcctgctccaccatggccagaaacgtgcctgcttccccttcgccttctgccgtgattgtcagcttcttgagggctccccagccatgcttcctgtacggcctgcaaaactgtgagtcaattaaacctcttttcttcataaattccccagtttccagtagttctttatagcagtgtgaaaacagactaatggacccttctggttgaaggaatgtagccattctgcttgtttaagtatttcctttctattcatctctatttcccgggaggtgtttatccaagtgcaataggagatattggtgactgcagagtcccctcagtgttctgctagtaaatagttgaaggttgatcagtgatctccagcattttcagtctggcatggaaaagcccccatgtaactggtaaaggtatcagtaagcaccaggaggtatctaaatccaccaggagccataggcatcatgttgatgtccatttaccagtcttccctggcaagattctctgaattgtactgccttggccaaaagaggtatgggaggggctgggcacagtggctcacgcctgtaatcccagcattttgggagaccaattcgggtagatcattagaggtcaggggttcaagaccatcctggccaacatggtgacattccatctctactaaaaatacaaaaagtcagcggggtttggtgttgggtgcctgtaatcccagctactcgggaggctgaggcaggataatcacttgaacctgggaggaggaggtggcagtgagctgagatctcgccattgcactccagcctgggcaacaagagcgaaacttcatctcaaaaaataaaaaaagaagtctgggtgtggtggctcgtgcctgtaatcccaggactttgggaggccaagatgggtggatcacgaggtcaggagttcaagaccagcctggcctagatggtgaaaccctgtctcgagtaaaaatacaaatattagctgggcatggtggcacacacctgtaatctcagctactcagaagtctgagacagaagaattgccaaaacccgggagggagaggttgcagtgagccgagatcgcgccactgcactctagcctgggcgacagagcaagactccgtctcgaaagaaagaaagagaaaggaaattccccagggaagtacctcggcttatttcatgaagaggtactgaaggaagcagaggcatgtggaggacttccccacctcgtgcagctatttgggccgtggcgtctgaaatttcttatttcagagtcacccctttgatgaccttggcagtggactgcagtcatctgtttaggcctctccatggcccgtgtcaatgccgatatttctgtctgttgcacatttgatttccttgttgttggcatttagaaggccccctgtttcccagatcacaccacgggcatggaccgcagagattgcatcttgtgagtctgtagaaacggtcaaggccttgtcctctcttaggtccagagctcaggtgaatacagattttcccggccgtctgtgctgaagtccctgtggggaggctcctggctggtttcctgtaggtagacagctacacgtcctgcccttcattggcttcttttcatgaagctcctgctgtctacaaaacatgtctcccttttcttcttgaaccacatctctgttattgaaactctagaagtcagccaggcacagtggctatgcctgtaatcccagcactttgggaggccaaggtgggcggatcacctgaggtcaggagttcaagaccagcctggccaacatggcgaaaccctgtctctaatacaaatactaaaattagccaagcatggtggccactgcactccagcctgggtgacagagcaagactctgtctcaaataaagaaagagaaagtatcatgcttttcagagttctgtgggttgttatggtgaattatcaaacctgaggacgtggtgggaacctccaaatttgcagccagttggtgagaagtacatgcggtctgtggacacccaagcttgcagctgcatctgaagcgagggcagcctagcaggggctggtggccttaacctgtggcatttgatgtaacatcagggagttgacatcagaattacgtcacacaggccaggtgcagtggctcatgcttataatcccaggaattagaaaggcaagataagaagattgcttgagcttgagtctgagcccacagtgagctatgaccgcaccactgcaccccagtctgggtgacagcacaagaccccgactccaaaaataaaaaagaaaaatcacaaagaattgcatggcagagtgcctgtctttcacagcttgaactgttgcaggaactttctttttttctttttttttttttttcttttgtgatggagtctcgcgctttcacccaggctggagtgcagtggcgcgatctctgctcactgcaggctccgcctcctgggttcacaccattctcctgcctcagcctccggagtagctgggactacaggcgcctgccaccgcgcccagctaattttttgtatttttagcagagatggggtttcaccgtattagccaggatggtcttgatctcctgacctcatgatccgcccacctcagcctcccaaagtgctgggattacagtcctgagccaccgcgcctggactttttttttttttttttttttttgagaggggttggggagacatattctctgctagtgattctcctgcctggtctcgaactcctgctgggatcacaggcgtgagccaccacgcccagccacctttagagttttcttaccacctggttttcctctctcaatatctttctctcatttcctgctttaaaactctagcttggggtctgggcacagtagctcatgcctataatcccagcactttgggagactgaggcgggtggatcacttgaggtcaggagtttgagaccagcctggccaacatggtgaaaccttgtctctactatttttacaaaagttagtcagacgtacaggcggatgcctgtagtcccagctacttgggaggctgaggcaggagaatttgcttgaacgcggaggtgaaagttgcagggagccgaggttgtgccactgcactccagcctgggagacagagcgagactgtctccaaaacaaacaaacaaacaaaaaaaccctgtagcttgggatcagccttctcttctgttgtttttctttaaaaaataaaaattaaaaataggcttcaagtgatcctcccgccatgacctccaaaactgctgggattgtaggtgtgagcactgcacccagccgtatgtttttttctacataaaaaacagcacaggattgtcttccaaagctaataaatatgttcaaataaccacaaccccattaaggaaaaatgtcacttgacagcaaataatcaatccagaccacaatatgatcacactcactgtgaaggtgagaaaagttcatctttattatgtttccccaagagatgcactgcactgttctcttgaaaacacacagctcatgtcctcctttagaacacacatcctctttaaagtaacatacaaacatgccaaaacaagataaaaaattccatctgaattctcacatttcaaacatacactaaatatcaaataaaaatttatttttacaagaatttaggggaactaccacatagctataaatgtaatatatatgttaactgagtatcatagataaaaaccatgctcccttcagcagcacgtgtaataatagatacaaagattgaaaggtaaaagatttaggatgaaaagaatcctctcttaaaaaggaaaacaaaattatatgtatgtgtatacaacagttataacacccatcacacagctttatagaaacagcatctattcaaaaataccagtatttccaaaatatttaaaataatatttaaagtaataataatatttaaataaataaatatatttaataaatatttcaataaataaaataatatttaaataattctatacccatgtttttcaaaataaaccaataaaatagatagtatacattagacgtgttagtatatatatctgagacatgttaaaaatcacaactgaattctcacaattcagtcacaaacctaaacagcaaataaaaatttctatcaccagaattatgtttttttctggtggggaactaccaatagctataaatagaagagattattatggaagtatcatagataaaaagagtgctcgcttcaggagcacatataataatacagaaaaaaatttaaagataaaagatttaggataaaaagaattgtctcttaaaaatgaaaagaaaattatctttatgtatatataacaactataactctcatcaaaaaactctacaggaacagcatgttttcaaaagtacaacaatttccaaactatttgaaataaacctattaataattcaatggccaacattttccaaacaaaccaataaaatgcatagtgtgcatgaagctatctgttacagtctgtggcactcatatttcacaaagaattctgtgccaatctgagcccctgcactgtgccttcaaatgctcctggactgtggcaaccaagtccataagaaacaggacctccaggttccggcccagggaggttggcattcagcaatataaaaagggaggtggtgccgcaggaaagggtggaactggaaacactcctgttttcttacttttctccaaggactcctagaagtaccccaccccacccctgctccttggaggacaacgtgatcactgtattcagctcttgtcaagaatggtccaggttcttctagatgatctgcacaaatggttcctctcctccttcctgatgtctgccattagcattggaataaagttcctgctgaaaatccacatctcccctgggtccggtgttctggaagtgagagagacaatgtcacacttcaaggaggcagctctctagacaggaaggttattcacgtcccatgtcaagtctagctagagttcagagcaattgagaagtgcaattttatctcctgcctttcattctgtaccctgcttctgaaccatcgtgttcaactgtgaaactcacactttggtgaccctgactccaaaacttaatacacccaaggtcagccccagtgatctgcttcatagcaaggactttgggtgggtcttcccagggagtagggcaccctcagagaatgtggctttggacttcatcacagctggggccttttgtgtcacttcagatctaaacttgtaaccgtgctagatctgtttctaacgtgacaacatcacgaaccacgagtccagaagcctaatccataatcctccctcctcatgacgaagtctcatgctctgtgctcaacatggttagctgcacaagatgtaaaccaaagcttcactgaaccctcgacccaaatcggtaactcaagtgcatcaatcataatgaacctccccaaactcagtatttatgattatttttgaggcagggtctcactctgtcgcccgggctggagtgcagtggcaggatcagggctccctgcagccccgacctcccaggctccagcgatcctcccgcctcagcctcctgagtagttgggagtagagatgcctcccacatcgcctggctaatttttgtatttttgtggagaggggatctcgccacgttgcccaggcttgaagccagatcaagcaattgggttccttggatttccgaaatagaccccaatattctgcctttaccccggaggatgcagatgtaccttctctcaggccgatgacctcaggcctccacggtccctggagctctaggaaaagtgggcgcgatctcgcgcccacacccagtgctctgggtcataagcctggatctggaaaaacaaacgcgctttgagaagacggggactccccaggatacccctctctcccctcgtccagcctccagcccacccgattcctccccacatcctccacgtccccaggccccacccacctcttccaactcctccagggaaacccaagccctgcagcgcatggaacaaaagaagtggaaccgatacttccggaacaaggctatctgagagcagttcttcctggccctcgggttcatgtaacggcataactggaaccaaagctcactgagcaagggtatatgagagcgggtctcctcgtacaggaagtagaagatgttttgtttgggggcctcgtcgtcctcctccatgtcattggccagatagctgaggacagaaatcaggttgctgctcaggggcaccaccaggagagacctccggctgaggtcagcttctcagagaggaaggtaagggaccgtccctagctcaggactggcacccaccctgcagagagccacgccttcctcaggagggctctgctggacagagacctgatcaagggcgtctcccactccttcaggatggagacaaaaacccaactggtgaccaagagtggtggcttatgcctggaatcccagcacactgggaggccgaagcaggaggatcacttgaggccaggagtttgagacaggcctgggcaacatagcaagaccctcgtctctattaaaaatataaaaaatacgccagacgtggctcatgcctgtaatcccagcgctttggaaggctgaagcaggtggattgcttgagaccaggagtttgagaccagcctggtcaacacagagaaaccccatctatactaaaaatacaaaaatcagcctggtgcggtggcacacccattagtcctagctactcaggaggctgaagcataagaattgtgtgaacccaggaggcggaggttgcagtgagccaagattgggcccctccattccagcctgagagacacagcaacactcttgtcttgataaataaataaataaataaataaataaataactgtccaggtgtggtggtacagccctgtagtcggagctaatcaagaggctgaggtgggaggatcgcttgagcccaggatatggaggctgcagtgagctatgatctcaccactgcactccagcttaggggacagggcaagtctgtctcaaaaaaaaaaaagcaattgaatacactgatattttgccaggaccctgccttctacaggcatctagtctaatgggactgggagtaatcaggggagatgacctaatcccaatgtcacattataataggatgtaactggagagctacgggcatgcagaagttggaagacgagggaaggcatcacagaggctgtggggtgaaccgacttcaaggaatgggtccttcccttcagagccacatgtgtgcgggacacccagacagaaaacacaaatgcaaagtcaagtggagggcatttggaaggagcagtgaagccaagccaggaaacaccaagatggcgagccagtgtggttgtagagattgtagagagggtggaattggcactgtggaccctggcctcgatagagaaagacatcagctaaggaagttgttcaggtgggcagtgaggttgtcgtgctttggaaagatgttcaggctgcactaggaagccccttggcttggggagagactccaggaaaccccagcagggagcatttgacagtggattcgagtgatgcaagggggacctggactgtgacctctgtcacgggaacccggaggaggctgatggcttttgcggttgatgtgggaaggagagagagagaacaaccggaaacgtctgcttgctgggggaagtgtcatgtccgctcctccgctccttttcttctccccttaggagcggttcatggttccttttgttttttgttctttttttttttttttttttgagactataatcctgtcttttttgtacacagagtaaagaggacaaataggtgaaagaataaatgaaaggctggaatcccacttcccccgctgtcccagggcattggatattgacggataggaggcagcaaaccactcacagagccaggaagaaatgaatgcgttggtattgccaggaggggaggccggcccggctgaaatacgctatgaccatagccaggagatactgatggagagaaaggaacacagagagggagaggtcacatcttgggagaggaagattgtggatatagtggaatgggggtctggggaggggttgcccatcagagaagggacctcagtgttggggtgactgtgctcatgtggaaattgcggggtggaggggtattcgaaggtcggatgcaaatccgagaagccggaggaagggttttcggtgatgctcccaggatggtgggctccgatgggatctttggagggggtgtgtctaggtcggctggtgtcaggagggtcttttgtgtgccaggcagagaactgtcccaaggagctgagagtagagggcccaggagcttcagggctgcagccagactgtggcccagggctcagatcccaaaggacccataggagaggcaggggccactcattcactctgcaagagaccagcagaatcctgacggagatgctgacaaatcataaaaagacaaagaatagccgggagtggcagctcaagcctgtgatcccagtactttttgagaggtggagacaggaggatcatgtgagcccaacagttggagaacaacctgggcaacacagcgagaccctgtttctaagaagatttcaaaaattagttgagcatggtagcatgtgcctagtcccagctcctcaggaggctaaggaaagaggattgcttgagcccaggaattagagtgagctatgatcatgccactgtactccatcctggggagcagagctggactctgtctcagaaaaaaaaatgtgtgggtgccaagactcaagaccatgggagctggtcagacacagtgctgacgtctgtaatctgagcactttgggaggccaaggcgggtggatcacctgaggtcaggtgttcgggaccaatctggccaacatggcaaaaccccgtctctactaaaaacacaaaaattagccaggcatggtggttcatgtttgtaatcccagctgcttggaggctgaggtgggagaatcgcttgaacccaggaggcatcagctgcagtgagtcaagatcgagacactgccctccagcctgggcaacagagcaagactgtgtctcacaaaaaaaaacaaaaacaaaaacaaaaaaaaactgtaggagcatctggtgggaggtggtggacggagaactgtgggtttggaagctgcgccctctccctggccgtgcgttagaacaggaacacagttacatagagaacaaccttaccttgtccgacaccctcagatctttgtcccaggccaggagtcttttaatgacaggatcctctgtgattagagagcagatgtcagtgtgagaagcaggacagggtttccgtgagagcagcagggcagcgaggagaagtgtgcctcccgggggaaagtctcaggattgtggctgcgggtgaggtggatgggagaggggagaatgactttcactgggcaagggagagaggctcctgctctgagactcccctgagaagaggccgaaggaggccctgggtgtgagaatctacaggacgtagagctgggaatcagccaggaccccctccagcagacacggagggaccactgcagagtcataaaggaattcccatcatttcctcatgagacagtcacacatcagggtgtgaccatggccttgggatccctcactatggatggaaacacttaggtttagaaaagtcagtaagaaacattaagtttcagagggcacagctgaaaccacttttttgatttttgattttgtttttctttatttgatttttatttttatttatttattaatttattttgagacagagtcttgctctgtgggccaggctggaatgcattggcctgatcttggctcactgcaacctctgcctcctgggtttaagcagttctcctgtctcagcctcccgagtagctggaactacagggatgagctactgtgcccagccttggtttttcttttgacgcagagttttgctctgtcacccaggctggagtgcagtggtgcagtcatagctcactgcagcctcaaagtcctgagttcaagcaatcctcttgcctcagcctcccaacgtgctgggatctcaggcgggagccacagcgcctggcccaaaaccaagctttcttatcccaagcaccgacctttatcaagtctacctaatcctctgttgtctccttaagtgtccctcatgagtgatcacttcagagtcctcccgcatggagagctcacccactggggcatatttttcccattggaaaagtgtggttattggaagtttcctctttagaaagaacaggattggaggtgctctctggggtgtcctcctaccaagcagcctgttgaaggcctcgtagtactcagggagcacgagcgacactcgccgtcgcttcgccttcatcttgaggccacacagcgtctccgccacccaggtctcctcaggctcaggggcgagctccttctctggctcatcatcagattcatccaaacattccctcttccttttccagccaagggacctacgtggggggctgggatctaccccaggggctgagtaaagaaaccaggccaccgtgtaatgcttctgcaactgatcacgttagaccccgaccccaaaccccaaaccactctccatcctccccagcctcgcagactgctggcttctccaagccacctttctgactttctcctctgctcaaccccatgtgccactccttcccctccccattcttccctctctctgtcctcagaacactgcctcatatccttccctggtccctggctctctgagtccctctttttttttttttttttttttttttgtttcgagacagaatcttgctttgtcacccaggctggagtgtagtggtgcaatctcagctcactgcaacatccatctcccggattccatttattctcctgcctcagcctctcaggtagctgggattacaggtgcctgccataatgcccagctcaattttgtacttttaatagagacagggtttcaccatgttggccaggctggtctcaaactcctggcctcaagtgatctgcctgccttggcttcccaaagtgctgggattacaagtgtgagccactgcacccagcctgaatttctccattcttcccacacaccctccccaggttctccttcctgacctctgacccttcttttgtttcttcttttttttttttttttttttttgagatagcatctcactctgtcacccagactggagtgcagtagcacgatctcggctcactgcaacctcttcctcccaggctcaagtgattctcctgtcttagcctcccaagtagctgggattataggcacacaccactaccgcctggctaatttttgtacttttagtagagatggggtttcaccatgttggccaggctggtcttgaactcctgacctcaggtgatctgcccgcctcagcctcccaaagtgttggggttacaggggtgagccaccacgcctggcccccttccttcatcttagtcaatcctatgccacctcttcttcctccagtcccctcacctgatggtcccgacacttcatcatccaccacctcctggagggggtaccctgaggtgctccgctgggggctccgctcttcctggggctgcggttgatggctcatcatgatctttcccaaaatctgtcccatctcaccaaacctagtctctgttctgtccttggtcttcttctggacactgctgggatccagaagagtgtgttatcaattctcgaggctgggagaagtcaggagtggagaacagctctgagaagttactgttgtccaactgaactcccaggtgccgacagagtccggtccctccaatcaggaaggtcggaatctctgatgtcatcgctcatgccaacctggcaaccagtttgaaaaaaaacacatgtaactgccaggctgatctcttgtcctggagatcctgggtgaatggtatctcctgccactgtcccaacctcagaccactgtccaaaagcatcttcagggtctccgcatccctctgttccctgtcccagcagaggctgtgtcctctccactcaaagcttgaagcgtgttggggtctcctcttctctgtacatgcccgtttcagagtccagtctggtgggagagggatcaggatgggaaagaaaagtagggtaagcagaaacgatgaaaccttacaagagtgagattatcatgtacaagagatcccaggaacattgacttgatgaaaaagtcacatcagagcactcaatttggcagaggttttctgccgagtgtctactgacattcactgtccgagattctgtactgggggtacacgcgtcctctgccctaaggcatctttgagtccaagagatattttgaggactggaaatcataggaaactgcccatgagttcacacatatttccaatggtgtccccaatttcagggagtccacggatcacctaaagccagcccctccagtttggctaagaaactctatatatcaagttttgtatcatatgtattgctcttaactcagaaaattccaccatttatagcagtggtttatttatttataccattgaaggaaatggtttatttatgaatctatattatggatattctataagatactgggtgtacaaaaagactaagtcgaaaaatctcagctgtgcacagtggctcatgcttgtaatcccatctctttgggtggccaagggaggaagactgcctgaggccagcagttcaagaccagtataggcaacatagcaagagcccatctctaaaacaaaacaaaacaaaacaaaacaaaattagccaggtgtcgtggctggcacctgtgttccaacaacttgagagactgaggtggcaggaggattgcttgagcctaggagttaggggctgcagtgagctgtgatcgtgacaccgcactccagtctgggcaacacagcaagaccttgtgtcaaaaaatttttttaaattaaatataaaagagtttcatgacattcagagaccatccaaagaacctgtgggttccggccaggcacagtggctcacgcctgtaatcccagcgctttgggaggccatagcaggtggatcgcttgaggtcaggagtttaagagcagcctggccaacatggtgaaaccccatctcttctaaaaatacaaaaaattagtcaggcatggtggtgggtgcctgtaatcccagccactcaggaggcggggacagcagaatggcttaaacttgggaggcggaggttgcagtgagccaaggtcacaccattgcactccagcctgggcaacaagagcaaaactacatctcaaaaaaaaaaaaaaacaaacaaaaagaacctgtggatgagttcccacatggcttcctaacgggctgcggctctcctaggagtctctcgctcgtgggaaaggcacaaactgaatgcggaaggaaatcccattgctatggaagtcccattgttaggaagctctgcttttctggagttcaaatttgcattcatgacgctttaaaccgtcagagctgggtgtgtcctcctacaacaaatcactttactctctctcctagttaacaggctttcaaatattagaacatccatgttctgacttcattaaaattgctcttttgtggaatgaaaagctctgatttaacccgtctttaagcctggtatgcatattcctctctgttccggccaccttgtctagacacactacactgaggcagtgcccatcttagatgatgttgatacattgtcaaaaaatgggcaaaccaggtgcggcggctcacacttgtaatcccagcacttttggaagctgatgccgacagataaccagaggtgaggaggttgagatcagcctggccaacatggtgaaacctgtctgtttttctgtaaaaatacagaaacaatgagctgggcgtgggagtgcacttctgtaatcccagctacttgtggggctgaggcaggagaatcacttgaaccgggaaggtggaggttccagtgagccgagatcacgacactacactccagcctgggcgacagagtgagtctccgactcaaaaaaaaaaaaaaaaaagtgccagacagcccaggtttggtctgatatgttcagaaaaaagcaaaacagtcacctctcaccttttcttttcctgcaatgatgccgtttaatacaacaatggctgtaggtctgcggcagaaatatcattcaagtgaaacagaagggctttcctggctggacacagtggtcactcctgcaatcccaacactttggttggctaaggtgggaggatttcttgcggccaggagttcgaggctgcagtgagctgtgatccaccactgcattccaggctgggcatcagagtgaggcctgtctctaaaaaaacccttcactccccaaaaaaagggattttcaaataccagcctttcagcatgaggatcacatggaggaacattaagacacagatgctgggacccagccctattgattgtaattaaaaaactgaggtgaggcctgatttagctccatcattggaatccattcagatttgaaattctctgagttggacagtgcaagagagatcctaaagaaagcaaagtcactgtggactgaaatgagctggcaaggttttctgagcgtggtgaaatatgatctgggcctcgcttgggagggctgtggccaggccttgagtccgtggctcagtgggaccttctgaaacagcctccaatccgtgcccccacttcatttgctagtggatgaccccctccagcggctttggtgctgatgggaataagtcaacctgcagcggaagttcagcccaagtttcagcccagcagcttctacacacctgtccgtggtctggtcatgctgccatctctgcggttctctgcggttctctgcggagtcgtggtttctgtaccttgaagagaacttcccctctgggacccagaaacccagtgaatcctcaggaaaaaagggaatgaaattactgaagacaactctgtggcggggagatggaaaagaggctctctctcttttttttttcctaatattttgagacagagtttcgctcttgtcacccaggctgcagtgcagtggctccatctcggctcactgcaacctctgcctcccaggttcaagcgattctcctgcctcagcctcccgagtagctgagattacaggcacccaccaccactcccagctaatttttgtattttagggtttcatcatgtttgccaggctggtcttgaacacctgacttcaaatgatccacccgcctctgcctctcaaagtgctgggaatacaggcataagacactgcacccggcctgtttttgttttttagagacaaggtctctgttgccttggctggggtgcagtggtacaatcagctctctgttgcctcctgggctcaagcaatcctcttctctcagcctcccaagtagctgagactacaggtgcatgcctgtagtagatatagcatcttgctctgttgcccagactggtcttgaactcttggtcacaagcgatcctcttgccttggcctctcaaagtgctggaattacacgcgtgagccattgagcccaaccagataagatgatctttaagggcccttcccatggtaccataatccaagtcagcgagactgtggctatagcaagtttaacataaccagatacgctagtattatgggctgcatggtgtgccccccacccctaattcatgtattgaagccatgaccctccagaccttagaggtgaccttattggaaccagagtctttacagaggtgatcaagttaaaatgaggtcactagaggccaggcacggtggctcacacctgtaatcccagcacttcgggaggccgaggcaggcagataatgagcccaagagaccgagaccatgatgtccaacatggtgaaaccctgtctctactaaaaatacaaaaattagccaggcgtggtggtgtgggcctgtagtcccagctactcaggaggctgaggcaagagaatcgcttgaacccggaaggcagagattgcagtcagccaagatcatgccactacactccagcctgggtgacagagtgagactctatctcaaaaaaataaaaattaaaaaactaaaaacctacagtaccgccttttacataatgcaatggtttggtaagcacatgcaccccagggaggtagtggcagattcagtcaaccttcccagcagcgtggagacgcagtcaggcatagcaggtgttgatgtggtttgaacccacagcttggctcaaatccacactcccctacttagtaccgagtgaagccacttaccctctaagtgccttacttttcttttcttttcttttttcttttttcgagacagagtctcgctctgtcacccaggctggagtgcagtggcatgatcttggctcactgcaaacttcgccttccaggttcaagcaattctcctgcctcagcctcccaagtagctgggattacaggcgcccaccaccatgccgggctaatatttgtatttttgatagagatggggtttcaccatattgcccaggctggtctcgaactcctgacctcaagtgatctgtctgcctcggcctcccaaagtactaggattagaggcatgagccaccacacctggccacttttcttatctatatttgttatgtggatgacttgtgttaacgcaaataagatgctgctcgtcatctttaaagaaaataggtggcaacctgttatagcaagtcctgtttttatttgtacttatgaggctttaattaaacgctaagaattaaaatgcacataataatagactttacctcacaaactggcttcaattattcgatgagacttacatgtattacttaaatgaggttaaatttaaccttttaaaaatgatttattgtggctgggcacagtggctcacacctgtaatcccagcactttgggaggccaaggcagatggatcacttgaggccaggagttgaagaccagcctgaccaacacggcaaaaccccatctccgctaaaaatacaaaaattagccaggcatggtggtgcacacctgtaatcctagctactcaggaggctgagacacaagaatcgcttgaacccgggaggcagaggttgcaaggaggtgagatcacaccactgcactccagcctgggcaatagagtgaggctctgccttaaaacaaagaaaaatgattttgggggatgatggggtgtcactatgttgaccaggcttgtctcaaactccttgcctcaagcaatccacccacctcagcctcccaagtagctggaactacaggcgcatgccaccacgcctggctaatatgtgtgtgtgtgtgtgtgtgtgtgtgtgtgtgtgtgtgtgtgtgtagaaacaaggtcttactgtgttgtttaaactgctctcaaactcctgggctcaagtgatcctcccacctcggcctcccaaatcattggaattacaggtgtgagccacctcactgagccctccacctttcagctgaacgcagaaaagtacaatcttttaacccaaagcgttcctcacacttagggtcaggaagagcccttcatgccctggaggcaactactaaccctctgctaaacactctgactctgggtgtgagaaacacacctactgtgccccacatatttttccaaatacaacttaatttagccttcacgacaaccctggagtgaaggatcattaactttatttcatagatgtggaaactgagactcagaggcaggaaatgacctccttctggaggctgcaaattctttgatgctcctttgatcaacaggtgggagctggccagaggtggtggctca

SEQ ID NO: 1816 - DNA, 8923 bp, Homo sapiens
gcgcccacacccagtgctctgggtcataagcctggatctggaaaaacaaacgcgctttgagaagacggggactccccaggatacccctctctcccctcgtccagcctccagcccacccgattcctccccacatcctccacgtccccaggccccacccacctcttccaactcctccagggaaacccaagccctgcagcgcatggaacaaaagaagtggaaccgatacttccggaacaaggctatctgagagcagttcttcctggccctcgggttcatgtaacggcataactggaaccaaagctcactgagcaagggtatatgagagcgggtctcctcgtacaggaagtagaagatgttttgtttgggggcctcgtcgtcctcctccatgtcattggccagatagctgaggacagaaatcaggttgctgctcaggggcaccaccaggagagacctccggctgaggtcagcttctcagagaggaaggtaagggaccgtccctagctcaggactggcacccaccctgcagagagccacgccttcctcaggagggctctgctggacagagacctgatcaagggcgtctcccactccttcaggatggagacaaaaacccaactggtgaccaagagtggtggcttatgcctggaatcccagcacactgggaggccgaagcaggaggatcacttgaggccaggagtttgagacaggcctgggcaacatagcaagaccctcgtctctattaaaaatataaaaaatacgccagacgtggtggctcatgcctgtaatcccagcgctttggaaggctgaagcaggtggattgcttgagaccaggagtttgagaccagcctggtcaacacagagaaaccccatctatactaaaaatacaaaaatcagcctggtgcggtggcacacccattagtcctagctactcaggaggctgaagcataagaattgtgtgaacccaggaggcggaggttgcagtgagccaagattgggcccctccattccagcctgagagacacagcaacactcttgtcttgataaataaataaataaataaataactgtccaggtgtggtggtacagccctgtagtcggagctaatcaagaggctgaggtgggaggatcgcttgagcccaggatatggaggctgcggtgagctatgatctcaccactgcactccagcttaggggacagggcaagtctgtctcaaaaaaaaaaaaaaaagcaattgaatacactgatattttgccaggaccctgccttctacaggcatctagtctaatgggactgggagtaatcaggggagatgacctaatcccaatgtcacattataataggatgtaactggagagctacgggcatgcagaagttggaagacgagggaaggcatcacagaggctgtggggtgaaccgacttcaaggaatgggtccttcccttcagaaccacatgtgtgcgggacacccagacagaaaacacaaatgcaaagtcaagtggagggcatttggaaggagcagtgaagccaagccaggaaacaccaagatggcgagccagtgtggttgtagagattgtagagagggtggaattggcactgtggaccctggcctcgatagagaaagacatcagctaaggaagttgttcaggtgggcagtgaggttgtcgtgctttggaaagatgttcaggctgcactaggaagccccctggcttggggagagactccaggaaaccccagcagggagcatttgacagtggattcgagtgatgcaagggggacctggactgtgacctctgtcacgggaacccggaggaggctgatggcttttgcggttgatgtgggaaggagagagaacaaccggaaacgtctgcttgctgggggaagtgtcatgtccgctcctccgctccttttcttctccccttaggagcggttcatggttccttttgttttttgttctttttttttttttttttttgagactataatcctgtcttttttgtacacagagtaaagaggacaaataggtgaaagaataaatgaaaggctggaatcccacttcccccgctgtcccagggcattggatattgacggataggaggcagcaaaccactcacagagccaggaagaaatgaatgcgttggtattgccaggaggggaggccggcccggctgaaatacgctatgaccatagccaggagatactgatggagagaaaggaacacagagagggagaggtcacatcttgggagaggaagattgtggatatagtggaatgggggtctggggaggggttgcccatcagagaagggacctcagtgttggggtgactgtgctcatgtggaaattgcggggtggaggggtattcgaaggtcggatgcaaatccgagaagccggaggaagggtttttggtgatgctcccaggatggtgggctccgatgggatctttggagggggtgtgtctaggtcggctggtgtcaggagggtcttttgtgtgccaggcagagaactgtcccaaggagctgagagtagagggcccaggagcttcagggctgcagccagactgtggcccagggctcagatcccaaaggacccataggagaggcaggggccactcattcactctgcaagagaccagcagaatcctgacggagatgctgacaaatcataaaaagacaaagaatagccgggagtggcagctcaagcctgtgatcccagtactttttgagaggtggagacaggaggatcatgtgagcccaacagttggagaacaacctgggcaacacagcgagaccctgtttctaagaagatttcaaaaattagttgagcatggtagcatgtgcctagtcccagctcctcaggaggctaaggaaagaggattgcttgagcccaggaattagagtgagctatgatcatgccactgtactccatcctggggagcagagctggactctgtctcagaaaaaaaaatgtgtgggtgccaagactcaagaccatgggagctggtcagacacagtgctgacgtctgtaatctcagcactttgggaggccaaggcgggtggatcacctgaggtcaggtgttcgggaccaatctggccaacatggcaaaaccccgtctctactaaaaacacaaaaattagccaggcgtggtggttcatgtttgtaatcccagctgcttggaggctgaggtgggagaatcgcttgaacccaggaggcatcagctgcagtgagtcaagatcgagacactgccctccagcctgggcagcagagcaagactgtgtctcacaaaaaaaaacaaaaacaaaaacaaaaaaaaactgtaggagcatctggtgggaggtggtggacggagaactgtgggtttggaagctgcgccctccccctggccgtgcgttagaacaggaacacagttacatagagaacaaccttaccttgtccgacaccctcagatctttgtcccaggccaggagtcttttaatgacaggatcctctgtgattagagagcagatgtcagtgtgagaagcaggacagggtttccgtgagagcagcagggcagcgaggagaagtgtgcctcccgggggaaagtctcaggattgtggccgcgggtgaggtggatgagagaggggagaatgactttcactgggcaagggagagaggctcctgctctgagactcccctgagaagaggccgaaggaggccctgggtgtgagaatctacaggatgtagagctgggaatcagccaggaccccctccagcagacacggagggaccactgcagagtcataaaggaattcccatcatttcctcatgagacagtcacacatcagggtgtgaccatggccttgggatcccccactatggatggagacacttaggtttagcaaagtcagtaagaaacattaagtttcagagggcacagctgaaaccacttttttgatttttgattttgtttttctttatttgatttttatttttatttatttattaatttattttgagacagagtcttgctctgtgggccaggctggaatgcattggcctgatcttggctcactgcaacctctgcctcctgggtttaagcagttctcctgtctcagcctcccgagtagctggaactacagggatgagctactgtgcccagccttggtttttcttttgacgcagagttttgctctgtcacccaggctggagtgcagtggtgcagtcatagctcactgcagcctcaaagtcctgagttcaagcaatcctcttgcctcagcctcccaacgtgctgggatctcaggcgggagccacagcgcctggcccaaaaccaagctttcttatcccaagcaccgacctttatcaagtctacctaatcctctgttgtctccttaagtgtccctcatgagtgatcacttcagagtcctcccgcatggagagctcacccactggggcatatttttcccattggaaaagtgtggttattggaagtttcctctttagaaagaacaggattggaggtgctctctggggtgtcctcctaccaagcagcctgttgaaggcctcgtagtactcagggagcacgagcgacactcgccgtcgcttcgccttcatcttgaggccacacagcgtctccgccacccaggtctcctcaggctcaggggcgagctccttctctggctcatcatcagattcatccaaacattccctcttccttttccagccaagggacctacgtggggggctgggatctaccccaggggctgagtaaagaaaccaggccaccgtgtaatgcttctgcaactgatcacgttagaccccgaccccaaaccccaaaccactctccatcctccccagcctcgcagactgctggcttctccaagccacctttctgactttctcctctgctcaaccccatgtgccactccttcccctccccattcttccctctctctgtcctcagaacactgcctcatatccttccctggtccctggctctctgagtccctcttttttttttttttttttgtttcgagacagaatcttgctttgtcacccaggctggagtgtagtggtgcaatctcagctcactgcaacatgcatctcccggattccagttattctcctgcctcagcctctcaggtagctgggattacaggtgcctgccataatgcccagctccattttgtacttttaatagagacagggtttcaccatgttggccaggctggtctcaaacccctggcctcaagtgatccgcctgccttggcttcccaaagtgctgggattacaagtgtgagccactgcacccagcctgaatttctccattcttcccacacaccctccccaggttctccttcctgacctctgacccttcttttttttcttcttttttttttttttttttttttttttttttttttgagatagcatctcactctgtcacccagactggagtgcagtagcacgatctcggctcactgcaacctcttcctcccaggctcaagtgattctcctgtcttagcctcccaagtagctgggattataggcacacaccactaccacctggctaatttttgtacttttagtagagatggggtttcaccatgttggccaggctggtcttgaactcctgacctcaggtgatctgcccgcctcagcctcccaaagtgttggggttacaggggtgagccaccacgcctggcccccttccttcatcttagtcaatcctatgccacctcttcttcctccagtcccctcacctgatggtcccgacacttcatcatccaccacctcctggagggggtaccctgaggtgctccgctgggggctccgctcttcctggggctgcggttgatggctcatcatgatctttcccaaaatctgtcccatctcaccaaacctagtctctgttctgtccttggtcttcttctggacactgctgggatccagaagagtgtgttatcaattctcgaggctgggagaagtcaggagtggagaacagctctgagaagttactgttgtccaactgaactcccaggtgccgacagagtccggtccctccaatcaggaaggtcggaatctctgatgtcatcgctcatgccaacctggcaaccagtttgaaaaaaaacacatgtaactgccaggctgatctcttgtcctggagatcctgggtgaatggtatctcctgccactgtcccaacctcagaccactgtccaaaagcatcttcagggtctccgcatccctctgttccctgtcccagcagaggctgtgtcctctccactcaaagcttgaagcgtgttggggtctcctcttctctgtacatgcccgtttcagagtccagtctggtgggagagggatcaggatgggaaagaaaagtagggtaagcagaaacgatgaaaccttacaagagtgagattatcatgtacaagagatcccaggaacattgacttgatgaaaaagtcacatcagagcactcaatttggcagaggttttctgccgagtgtctactgacattcactgtccgagattctgtactgggggtacacgcgtcctctgccctaaggcatctttgagtccaagagatattttgaggactggaaatcataggaaactgcccatgagttcacacatatttccaatggtgtccccaatttcagggagtccacggatcacctaaagccagcccctccagtttggctaagaaactctatatatcaagttttgtatcatatgtattgctcttaactcagaaaattccaccatttatagcagtggtttatttatttataccattgaaggaaatggtttatttatgaatctatattatggatattctataagatactgggtgtacaaaaagactaagtcgaaaaatctcagctgtgcacagtggctcatgcttgtaatcccatctctttgggtggccaagggaggaagactgcctgaggccagcagttcaagaccagtataggcaacatagcaagagcccatctctaaaacaaaacaaaacaaaacaaaacaaaattagccaggtgtcgtggctggcacctgtgttccaacaacttgagagactgaggtggcaggaggattgcttgagcctaggagttaggggctgcagtgagctgtgatcgtgacaccgcactccagtctgggcaacacagcaagaccttgtgtcaaaaaaatttttttaattaaatataaaagagtttcatgacattcagagaccatccaaagaacctgtgggttccggccaggcacagtggctcacgcctgtaatcccagcgctttgggaggccatagcaggtggatcgcttgaggtcaggagtttaagagcagcctggccaacatggtgaaaccccatctcttctaaaaatacaaaaaattagtcaggcatggtggtgggtgcctgtaatcccagccactcaggaggcggggacagcagaatggcttaaacttgggaggcggaggttgcagtgagccaaggtcacaccattgcactccagcctgggcaacaagagcaaaactacatctcaaaaaaaaaaaaaaaacaaaaaaaacaaaaagaacctgtggatgagttcccacatggcttcctaacgggctgcggctctcctaggagtctctcgctcatgggaaaggcacaaactgaatgcggaaggaaatcccattgctgtggaagtcccattgttaggaagctctgcttttctggagttcaaatttgcattcatgacgctttaaaccgtcagagctgggtgtgtcctcctacaacaaatcactttactctctctcctggttaacaggctttcaaatattagaacatccatgttctgacctcattaaaattgctcttttgtggaatgaaaagctctgatttaacccgtctttaagcctggtatgcatattcctctctgttccggccaccttgtctagacacactacactgaggcagtgcccatcttagatgatgttgatacattgtcaaaaaatgggcaaaccaggtgcggcggctcacacttgtaatcccagcacttttggaagctgatgccgacagataaccagaggtgaggaggttgagatcagcctggccaacatggtgaaacctgtctgtttttctgtaaaaatacagaaacaatgagctgggcgtgggagtgcacttctgtaatcccagctacttgtggggctgaggcaggagaatcacttgaaccgggaaggtggaggttccagtgagccgagatcacgacactacactccagcctgggcgacagagtgagactccgactcaaaaaaaaaaaaaaaaaaagtgccagacagcccaggtttggtctgatatgttcagaaaaaagcaaaacagtcacctctcaccttttcttttcctgcaatgatgccgtttaatacaacaatggctgtaggtctgcggcagaaatatcattcaagtgaaacagaagggctttcctggctggacacagtggtcactcctgcaatcccaacactttggttggctaaggtgggaggatttcttgcggccaggagttcgaggctgcagtgagctgtgatccaccactgcattccaggctgggcatcagagtgaggcctgtctctaaaaaaacccttcactccccaaaaaaagggattttcaaataccagcctttcagcatgaggatcacatggaggaacattaagacacagatgctgggacccagccctattgattgtaattaaaaaactgaggtgaggcctgatttagctccatcattggaatccattcagatttgaaattctctgagttggacagtgcaagagagatcctaaagaaagcaaagtcactgtggactgaaatgagctggcaaggttttctgagcgtggtgaaatatgatctgggcctcgcttgggagggctgtggccaggccttgagtccgtggctcagtgggaccttctgaaacagcctccaa

SEQ ID NO: 1817 - DNA, 30724 bp, Homo sapiens
gggattataggcacacaccactaccgcctggctaatttttgtacttttagtagagatggggtttcaccatgttggccaggctggtcttgaactcctgacctcaggtgatctgcccgcctcagcctcccaaagtgttggggttacaggggtgagccaccacgcctggcccccttccttcatcttagtcaatcctatgccacctcttcttcctccagtcccctcacctgatggtcccgacacttcatcatccaccacctcctggagggggtaccctgaggtgctccgctgggggctccgctcttcctggggctgcggttgatggctcatcatgatctttcccaaaatctgtcccatctcaccaaacctagtctctgttctgtccttggtcttcttctggacactgctgggatccagaagagtgtgttatcaattctcgaggctgggagaagtcaggagtggagaacagctctgagaagttactgttgtccaactgaactcccaggtgccgacagagtccggtccctccaatcaggaaggtcggaatctctgatgtcatcgctcatgccaacctggcaaccagtttgaaaaaaaacacatgtaactgccaggctgatctcttgtcctggagatcctgggtgaatggtatctcctgccactgtcccaacctcagaccactgtccaaaagcatcttcagggtctccgcatccctctgttccctgtcccagcagaggctgtgtcctctccactcaaagcttgaagcgtgttggggtctcctcttctctgtacatgcccgtttcagagtccagtctggtgggagagggatcaggatgggaaagaaaagtagggtaagcagaaacgatgaaaccttacaagagtgagattatcatgtacaagagatcccaggaacattgacttgatgaaaaagtcacatcagagcactcaatttggcagaggttttctgccgagtgtctactgacattcactgtccgagattctgtactgggggtacacgcgtcctctgccctaaggcatctttgagtccaagagatattttgaggactggaaatcataggaaactgcccatgagttcacacatatttccaatggtgtccccaatttcagggagtccacggatcacctaaagccagcccctccagtttggctaagaaactctatatatcaagttttgtatcatatgtattgctcttaactcagaaaattccaccatttatagcagtggtttatttatttataccattgaaggaaatggtttatttatgaatctatattatggatattctataagatactgggtgtacaaaaagactaagtcgaaaaatctcagctgtgcacagtggctcatgcttgtaatcccatctctttgggtggccaagggaggaagactgcctgaggccagcagttcaagaccagtataggcaacatagcaagagcccatctctaaaacaaaacaaaacaaaacaaaacaaaattagccaggtgtcgtggctggcacctgtgttccaacaacttgagagactgaggtggcaggaggattgcttgagcctaggagttaggggctgcagtgagctgtgatcgtgacaccgcactccagtctgggcaacacagcaagaccttgtgtcaaaaaaatttttttaattaaatataaaagagtttcatgacattcagagaccatccaaagaacctgtgggttccggccaggcacagtggctcacgcctgtaatcccagcgctttgggaggccatagcaggtggatcgcttgaggtcaggagtttaagagcagcctggccaacatggtgaaaccccatctcttctaaaaatacaaaaaattagtcaggcatggtggtgggtgcctgtaatcccagccactcaggaggcggggacagcagaatggcttaaacttgggaggcggaggttgcagtgagccaaggtcacaccattgcactccagcctgggcaacaagagcaaaactacatctcaaaaaaaaaaaaaaaacaaaaaaaacaaaaagaacctgtggatgagttcccacatggcttcctaacgggctgcggctctcctaggagtctctcgctcatgggaaaggcacaaactgaatgcggaaggaaatcccattgctgtggaagtcccattgttaggaagctctgcttttctggagttcaaatttgcattcatgacgctttaaaccgtcagagctgggtgtgtcctcctacaacaaatcactttactctctctcctggttaacaggctttcaaatattagaacatccatgttctgacctcattaaaattgctcttttgtggaatgaaaagctctgatttaacccgtctttaagcctggtatgcatattcctctctgttccggccaccttgtctagacacactacactgaggcagtgcccatcttagatgatgttgatacattgtcaaaaaatgggcaaaccaggtgcggcggctcacacttgtaatcccagcacttttggaagctgatgccgacagataaccagaggtgaggaggttgagatcagcctggccaacatggtgaaacctgtctgtttttctgtaaaaatacagaaacaatgagctgggcgtgggagtgcacttctgtaatcccagctacttgtggggctgaggcaggagaatcacttgaaccgggaaggtggaggttccagtgagccgagatcacgacactacactccagcctgggcgacagagtgagactccgactcaaaaaaaaaaaaaaaaaaagtgccagacagcccaggtttggtctgatatgttcagaaaaaagcaaaacagtcacctctcaccttttcttttcctgcaatgatgccgtttaatacaacaatggctgtaggtctgcggcagaaatatcattcaagtgaaacagaagggctttcctggctggacacagtggtcactcctgcaatcccaacactttggttggctaaggtgggaggatttcttgcggccaggagttcgaggctgcagtgagctgtgatccaccactgcattccaggctgggcatcagagtgaggcctgtctctaaaaaaacccttcactccccaaaaaaagggattttcaaataccagcctttcagcatgaggatcacatggaggaacattaagacacagatgctgggacccagccctattgattgtaattaaaaaactgaggtgaggcctgatttagctccatcattggaatccattcagatttgaaattctctgagttggacagtgcaagagagatcctaaagaaagcaaagtcactgtggactgaaatgagctggcaaggttttctgagcgtggtgaaatatgatctgggcctcgcttgggagggctgtggccaggccttgagtccgtggctcagtgggaccttctgaaacagcctccaatccgtgcccccacttcatttgctagtggatgaccccctccagcggctttggtgctgatgggaataagtcaacctgcagcggaagttcagcccaagtttcagcccagcagcttctacacacctgtccgtggtctggtcatgctgccatctctgcggttctctgcggttctctgcggagtcgtggtttctgtaccttgaagagaacttcccctctgggacccagaaacccagtgaatcctcaggaaaaaagggaatgaaattactgaagacaactctgtggcggggagatggaaaagaggctctctctctttttttttcctaatattttgagacagagtttcgctcttgtcacccaggctgcagtgcagtggctccatctcggctcactgcaacctctgcctcccaggttcaagcgattctcctgcctcagcctcccgagtagctgagattacaggcacccaccaccactcccggctaatttttgtattttagggtttcgtcatgtttgccaggctggtcttgaacacctgacttcaaatgatccacccgcctctgcctctcaaagtgctgggaatacaggcataagacactgcacccggcctgtttttgttttttagagacaaggtctctgttgccttggctggggtgcagtggtacaatcagctctctgttgcctcggctggggtgcagtggtacaatcagctctctgttgcctcctgggctcaagcaatcctcttctctcagcctcccaagtagctgagactacaggtgcatgcctgtagtagatatagcatcttgctctgttgcccagactggtcttgaactcttggtcacaagcgatcctcttgccttggcctctcaaagtgctggaattacacgcgtgagccattgagcccaaccagataagatgatctttaagggcccttcccatggcaccataatccaagtcagcgagactgtggctatagcaagtttaacataaccagatacgctagtattatgggctgcatggtgtgccccccacccctaattcatgtattgaagccatgaccctccagaccttagaggtgaccttattggaaccagagtctttacagaggtgatcaagttaaaatgaggtcactagaggccaggcactgtggctcacacctgtaatcccagcacttcgggaggccgaggcaggcagataatgagcccaagagaccgagaccatgatgtccaacatggtgaaaccctgtctctactaaaaatacaaaaattagccaggcgtggtggtgtgggcctgtagtcccagctactcaggaggctgaggcaagagaatcgcttgaacccggaaggcagagattgcagtcagccaagatcatgccactacactccagcctgggtgacagagtgagactctatctcaaaaaaataaaaattaaaaaactaaaaacctacagtaccgccttttacataatgcaatggtttggtaagcacatgcaccccagggaggtagtggcagattcagtcaaccttcccagcagcgtggagacgcagtcaggcatagcaggtgttgatgtggtttgaacccacagcttggctcaaatccacactcccctacttagtaccgagtgaagccacttaccctctaagtgccttacttttcttttcttttcttttttcttttttcgagacagagtctcgctctgtcacccaggctggagtgcagtggcatgatcttggctcactgcaaacttcgccttccaggttcaagcaattctcctgcctcagccttccaagtagctgggattacaggcgcccaccaccatgccgggctaatatttgtatttttgatagagatggggtttcaccatattgcccaggctggtctcgaactcctgacctcaagtgatctgtctgcctcggcctcccaaagtactaggattagaggcatgagccaccacacctggccacttttcttatctatatttgttatgtggatgacttgtgttaacgcaaataagatgctgctcgtcatctttaaagaaaataggtggcaacctgttatagcaagtcctgtttttatttgtacttatgaggctttaattaaacgctaagaattaaaatgcacataataatagactttacctcacaaactggcttcaaatattcgatgagacttacatgtattacttaaatgaggttaaatttaaccttttaaaaatgatttattgtggctgggcacagtggctcacacctgtaatcccagcactttgggaggccaaggcagacggatcacttgaggccaggagttgaagaccagcctgaccaacacggcaaaaccccatctccgctaaaaatacaaaaattagccaggcatggtggtgcacacctgtaatcctagctactcaggaggctgagacacaagaatcgcttgaacccgggaggcagaggttgcaaggaggtgagatcacaccactgcactccagcctgggcaatagagtgaggctctgccttaaaacaaagaaaaatgattttgggggatgatggggtgtcactgtgttgaccaggcttgtctcaaactccttgcctcaagcaatccacccacctcagcctcccaagtagctggaactacaggcgcatgccaccacgcctggctaatgtgtgtgtgtgtgtgtgtgtgtgtgtgtgtgtgtgtagaaacaaggtcttactgtgttgtttaagctgctctcaaactcctgggctcaagtgatcctcccacctcggcctcccaaagcattggaattacaggtgtgagccacctcactgagccctccacctttcagctgaacgcagaaaagtacaatcttttaacccaaagcgttcctcacacttagggtcaggaagagcccttcatgccctggaggcaactactaaccctctgctaaacactctgactctgggtgtgagaaacacacctactgtgccccacatatttttccaaatacaacttaatttagccttcacgacaaccctggagtgaaggatcattaactttatttcatagatgtggaaactgagactcagaggcaggaaatgacctccttctggaggctgcaaattctttgatgctcctttgatcaacaggtgggagctggccagaggtggtggctcacacctataatcccagcactttgggaggccaaggtgggaggattgactgaggccaggagtttgaaactagcctgggcaacatagcaagacctcatctctacaaaaaatacacaaattagcagggtgtggtggtgcacacctgtagtcgcagccactcgggaggctgaagtggtagcattgcttgagcccaggaggttgaggctggagtgagccatgatcaagccactgcactccagccgaggagatggagatagaccctgtctcaaacaacaacaaaaaaataggtgaggatcagccaggcatggtggctcacgcctgtaatcctagaactttgggaggccaaggtgggaggattgcttgaggccaggacttcaagaccagcctgggcagcctagcaagatcccatcccttaaaaaaaagtttttaggctgggcatggtcactcatgcctgtaatcctagcactttgggaggccaaggcaggcgggttgcctgagctgaggagtttgagaccagcctgggcaacatggtgaaatcctgtctctactaaaatacaaaaaattagccaggtgtggtgttgggcacctgtaatcccaggtactcaggaggctgaggcaggagaattgcttgaacccaggaggcagaggttgcagtgagccgagagcgcaccactccactccagcctggacaacagagcgagactccgtctcaacaaaaaaatgtttttaattagccagctgtgatgatgcatgcccatgtcccagctacttgggaggctgaagcaggaggattgcttgagcctgggaggtcaaggctgcagtgagctatgattgcgcccctgcactccagcctggacagcggagggagaccctgtctgaaaataaaaaaagaggtgggggcctatgaccccccctttaattttggcccaaccttagtaacaggatagtcattgagtagggcaaaagtgatgttatgatgtttttcagcctccaatttacagtctaaaacatgtcttgggtaaacacagcaagactccatctcaaaaaaaaaaaaagaaaaaaaatcagaagtgaacctgtagcctgtagtgtgttgccaaataaacttatttttagagatacttctttccattttctgtgaggtcatctgcagtttcacatggtagacagacttaggtgagattcttagcaacatagaatgaagagtaaagaggtttgtttatttcacaagggtttattgaaggcctacgatgtgttaaatgctgtaggaaatacccactgatttctcttttcatggaggtttcccgccttctcttaatgagtgatcaattaaactgtttactgggaacttgctaagttaatgaacacacgggatacattctttggatgagcagacattggttgggcagaggggcaagaggagagcagtttagacagagacctgcttatacactgtagtgtctaagagagcttgtgatgttcaggaaacagttgttcactgtgctgcaatataggggacggccagttgcggtggctcacacctgtaatcctagtgctttggaaggccaaggcgggcagatcacctgaggtcaggagttagaaaccagcctggccaacatggtgaaaccccatctctactaaaaacacaaaaattagctgagtgtaatggtggatgcctataatcccagcaacttgggaggctgagacaggagaatcacttgaacttgggaggtggaggttgcagtgagccgagatcatgccattgcactctagcccaggtgacagggtgagactctgtctcaaataataataataataataataataataataataataataataataataataataatgtaggggacttgatgaagggaaaggatcagagagattctgaaaagaaggtagtttggggcccagtgatgactagattttaagtttcatatagtaggaagtggggcactagtaatttttcaagcagaaaaattatttgaccagattcgtgatttcaaaaatagctctggtgatagagtggaggatgggttggagcagggaataaggggaaatgaaaccgttataaaactcttaaagtgggctgggcatggtggctcacgcctgtaatcccagcactttgggaggctgaggcgggcggatcacgaagtcaggagatcgagaccatcctggctaaaacggtggaaccctgtctctactaaaaatacaaaaaattagctgggcatggtggtgggcgcctgtagtcccagccactcaggaggctgaggcaggagaatggtgtgaacccgggaggcagagcttgcagtgagctaagatcgtgccactgcactccagcctgggcgacagggcgacagagcaagaatccgtctcaaaaaaaaaaaaaaaaaaaaaaaaaaaacctcttaaaacaagtacagcaagaactttgagggtctttgctaagacagcagctggcagcttcaatttggagtagggtatcaaaggcaactgtgtataaggaatagttatataactggtatccaatttctgagatgattttgacttaaacattgtgtatttcccagcatactgttggtttttctaattatgtgggaaattatgttgcttttacttttttttttgctcattgcccagcctagggtgcaatgctgcaatctcagctcactgcaacctccgcctcccaggtttaagtgattcttctgcctcagcctcccaagtagctgggattacaggcgcccaccaccatgcctggctaattttttgtatttttggtagagacagggtttcacgacgttggccaggctggtctcaaactcctgatctcaagtgatccacctgcctctgtgtcccaaattgctgggattacaggcatgagccaccgcaccggccatgctttcagttttcaagaaagaagacaccattattgccaaagattttggtaatttgagagatacaatgtatgttttctccatgtggatactagatagtaaggatgtgttgaatttgaagtgtctatccagaagtattttgggtacttgtttaaggattgtaaaacaatgtttccatttctggatataataaatgtatttgttaatataataaatgaatagattagacccataaactatttgcagtgttgagtcatttcccacagttaaaatcaggatgaaaatatatagctgaatacttgctttgtttcttgtaactgatttctttagtacagaacctgctaaggccatcaaacctattgatcggaagtcagtccatcagatttgctctgggccggtggtactgagtctaagcactgcggtgaagaagatagtaggaaacagtctggatgctggtgccactaatattggtaagtttgggagagttttaagccacaagaaatgatcagtgaatgttgttgtagtcaagaaacatttgttattgaaataagactatcaagtgttgatgtagtaataaactattatttttaagttaaagttagcacctattatgtgcctagtacttagctaggtagtaataataataacgacagcttttcttgtgttcttatggtgtgccaggcaggtgttatgctaagaattgcacagaaatatctcatttaatttgcagaatagctgggcgtggtgtctgacgcctgtaatcctagccctttgagaggctgaggtggggggattgcttgaagccaagagttcaagaccaacctggccaacatggggagacctcgtctctattaaaaaataaagcaggccgggtgtggtggctcacgcctgtaatcccagcactttgggaggccaaggcgggtggatacctgaggtcaggaattcgagaccagcctgtccaaaatggtgaaactctgtctctactaaaaatacaaaaattagccagacctggtggcagaagcctgtaatcccagctactggggaggctcaggaatgagaattgtttaaatttgggaggtggaggttgcagtgaaccgagatggtgccactgcacgccagcctggggacagagcaagactctgtctcaaaaaaataaaataaaataaaataaaataaatcctggagtagtggctcacatctgtaatcccagcactttgggaggctgaggggggctgatgctttgaggtcaggagttcaagaccagcctaaccaacgtggtaaaaccctgtctctactaaaaatacaaaaattagccagatgtgatggtgcatggctgtaatctcagctcctcagaaggctgagggaggagaattgcttaaacctgggaggtggaggttgcagtgagccaagatcgattgtgccactgcattccagcctgggtgacaagagcaaaagtccatctcaaaaaattaaaaaaaaaaaaaaaaaaaggaaagaaaaaaaagaaaatgacaaaattaaaaaaaaattattaatctgccaaataactttatgagatagaacttattacctccattttacagttgaggaaattaagggacagtaaatttcctttttttgagattataaagctaataaaatagaatctaggaagtctgattccagaaccagttctgtttttttttcttttttttttttttgagatagagttttgctcttgttgccgaggctgcggtgcaatggcacgatctcaactcactgcaacctccacctcccaggttcaagcgattctcctgcctcagcctcacaagtagctgggattacaggcatgcaccaccacgcctggctaattttgtatttttagtagagatagagtttctctacgttggtcaggctggtctcgaactactgacctcaggtgatccgctcgctttggtctcccaaagtgctgggattacaggcatgaaccactgcgcccggcccccgttctccttactgggtatgttaaaattatttctttcaaaggaaaaggctggtcaaagtgcaacggtctttacaactaattgatcacaaccagttacagatttttttgttccttctccactccaactgcttcacttgactagtgtaaggaaaaaaaaaagaggaaagaaagaaaatgctaaactatttaatctgggctagtaaatggccagaaagaactttataaaaatgaaatatacaaaatgacactagtatgtttaactaaaggtatagttacgacacttaaatttgcacgttataaataatatcaatataaaaactgatagcgtgggtccatttttaataaatatataaatattttaaactttctagatctaaagcttaaggactatggaatggatctcattgaagtttcaggcaatggatgtggggtagaagaagaaaacttcgaaggcttaagtaagttaactttctaatcctattacaaaataattgggccacatgtcttagaattttgagtaacactgtcttgggaaacacaaaaacagttttttaaagccagttactagatatcatgtatatttgttgttatagcacttgagatatcttagtccttactttacagtctctttcagctctgaaacatcacacatctaagattcaagagtttgccgacctaactcgggttgaaacttttggctttcgggggaaagctctgagctcactttgtgcactgaggtgagaaaatatttttatccattcacttgaccccttagaaaaacctctctgaaaattaattggaatcattattatttacaattttctatctcaatatctcagcttctagcttctgaattctgttttgtctcactgccaatctaagtcctagtacttctgaaatgtgagcaataaatgaatgaaatgaagcaaatagtattgtttaaaaaattggttacccttattaaaacagtaacttctcaatttgaacataacatatagataataaatgatagttaccattggttttcattatcaatttttagggaaacatttcaccaaagcactatttaattacagcacagatactaaatttttataaataattacatgcacacacacatatatatacatatatatacatatatatacatatatacatatatatatacatatatatacatatatacataaatatatacatatatatacatatatacatatatacatatatacatatatatacatatatatatacatatatatacatatatatatatatatattttttttttttttttttttagacagagtcgcactctgtcacccaggctggagtgcagtggcacagtctcagctcactgcagtctctgcctcccaggttcaagtgactttcgtgactcagcctcctgaagagctgggactatagcgtgcaccaccactcctggctaatttttatatttttagtagagatggggttttgccatgttgcccaggctggtctggaactccaggcctcaagtgatctgccctccttggcctcccaaagtgctggaattacaggcacgagccaccgtaccctgccctacatatacattttaattataatatcttttggattctttaaaaaaaattttaaaaattttaaaaaattctttaaaaaaattcttttaaaaaattttgtttgaagagtaataacaaaacaaatctctatttgagaatcaataaatcttgagatcatttatggttttgcaattcaacctgaaaaatgaagtcaaagcttttatcaaaacaaagcatgtttagtgctctctgtctcactgtcttttagatgccagaccttagattttgtgatgactcctcaaccgtttagatctcggttatctcagagggatcatcagctttttaagaaaattttgagagaaaagcaagtgaagaaaagagtagtcagtgcccaacatcatggatctctcactgaacacaccatgcctggtattctctcacagtgatgtcaccatttctacctgccacgtatcggcgaaggttgggactcaactggtgtttttgatcacgatgggaaaatcatccagaaaaccccctacccccaccccagagggaccacagtcagcgtgaagcagttattttctacgctacctgtgcgccataaggaatttcaaaggaatattaagaaggtacagtaaattaatcctggttttcaagagtattggttaatgcacatgagcaaaagatttactaaagatgtttattcttcagttgattctcttcccataatttattgagaaatgctttatttgcatttctcattaaagacttaacttcaggatgatttacttttttctttttatcacataatgtttattaggactgggaaacatagtgagactctgtctctatgaaaaattaaaaaaaaaattgactgggcatggtggcatgcacctgtagttccagctacttgggaggctgaagtgggaggatcacctgagcccaggaacttgagactgcagtgagctatgattgcgtcactacacttcagactgtgagacagagtaagaccctgtctggaaaaatatatatacatatatatacattttttttattttttatttttatctttttttgagatggagtctcactttggcaccctggctgcagtgcagtggcgcgatctcagttcactgcaacctccacctgccaagttcaagcgattctcctgcttcagccttctgagtagctaccattacaggcgcgcgccaccacgcccggctaatttttgtattttcagtggagacggggttccaccatgttgtccaggctggccaggctggtcttgaattcctgccctcaggtgatccgcccacctcggcctctcaaagtgctgggattacaggcgtgagccaccatgcctgaccttatgtacttatatttttatgagaatatttctcttggttttctgataaatgagttactggaacccttatgaatttgaatgcaaatgaaacagctaaatgttatataattgttgtgtttaaaaagcagattataaaactgtctgtattatatgattacagttttataaaaacaaaacaggcctaaatgtgtatagtataaagactgaagagtcagcacttccatgttctcagcggttatccttggatgtgagatctcatgcactttttgctctcttctttgtgcctttccattttgcatgcgtatttcttataatctaaaaagttacttaaacatatgcagctaaaaactttttttacttgtaaagcgtttggtgctaattttaacttttttttttagacggagtcttctcactctgtcgcccaggctggagtgcagtggtgtgatcttggctcactgcaacctccgcctcctgggttcaagtgattctcctacctcagcctcccaagtagctgggattataggtgtgtgtcaccacacccagctaatttttgtatttttagtagagatggggtttcaccatgttggccaggctggtcttgcacccctgacctcaagtgatctgcccacctcagcctcccaaagtgctgggattacaggcgtgagccaccacgcctggctttttttttttaaagcttttttgtaagtcagccagcaagaacacaggaggaagtactcaaatctcccttacacagctgggggctgtgtcaggttttataagcatagggtaatgaggtgtgatttgattggatcttgcaataaagtaatgctgggaggtgtgatctgactggatcctgccatggggtgacaccaaaactcaatctgattggatcctggctcctgcctgggggtgtctggttcttaaatcggtccgagctcttcaggctgagctcttaggttccactccacggtggcacgcgtggttaacctgggcatgcacagggtacatgaccttcaacctgcaggtcgatggcaattggaaaacaactgacaacttcattacataaaagttgaactgattcgggtgcggtgactcacgcctgtaatcccagcactttgggaggccaaggcaggtggatcacctgaggtcgaggagttcaagaccagcctggccaaaatggtgaaaccccgtctctactaaaaatataaatattagccaggcgtggtggcgcacccttgtaatcccagctaccccagaggctgaggcagcagaatgcttgaacctaggacgtggaggttgcagtgagctgagatcgtgccattgcactccagcctgggtgacaagagtgaaactccatcaaaaaaaaaaaaagttgaactagatttggtctgatgcagttacagatttacaaaccgcgtcccaccctcctgccaacaccttccactcctcattcttgagggattagggatggaggtcatgcttctgtatcgacttcatgctgaccaggggcacttagtcccctaaagtgagaggaatgaaactcttgggcttctgagttcagatgagttctggggtcacccggagtagcttgaaaggctggtattgttgtaatacaagctgaaggtggaagtgttggatcctggaggacaaacagctcaccatccatttaaataaataggaccaaaaagtaacagaacagtggccacgaggggccccaacagaggaagaaaccaggtgaggtgtggtatagtggactcgactgccttctaaatctcagtggttgtccgggtgcggtggctcacgcctgtaattccagcaaaagaagagccgaggcagggtgatcacgaggtcaggagttcaagaccagccgggcaaacatggtgaaaccccgtctctactgaaaatacaaaaattagccaggtgtggtggcgtgtgctgtagtcccagctactagggaggctgaggcaggagaattgcttgaacctgggaggcggaggttgcagtgagccgagattgtgccactgcactccagcctaggtaacagagcaggaccccatctcagtcaatcaatcaatctcagtggttgaactacccttgatatggttcagctctgtatccccaaccaaatctcatgtccaattgcaattcccagtgttgagggagggacctggtgggagatgattggctcatggcggctgacgtcccccttgctggtctcgtgatagtgagtgagcgctcatgggatctggttgtttagaagcatgcagcacctcctgcttcactctctctgtctctcctgctccaccatggccagaaacgtgcctgcttccccttcgccttctgccgtgattgtcagtttcttgagggctccccagccatgcttcctgtacagcctgcaaaactgtgagtcaattaaacctcttttcttcataaattccccagtttccagtagttctttatagcagtgtgaaaacagactaatggacccttctggttgaaggaatgtagccattctgcttgtttaagtatttcctttctattcatctctatttcccgggaggtgtttatccaagtgcaataggagatattggtgactgcagagtcccctcagtgttctgctagtaaatagttgaaggttgatcagtgatctccagcattttcagtctggcatggaaaagcccccatgtaactggtaaaggtatcagtaagcaccaggaggtatctaaatccaccaggagccataggcatcatgttgatgtccatttaccagtcttccctggcaagattctctgaattgtactgccttggccaaaagaggtatgggaggggctgggcacagtggctcacgcctgtaatcccagcattttgggagaccaattcgggtagatcattagaggtcaggggttcaagaccatcctggccaacatggtgacattccatctctactaaaaatacaaaaagtcagcggggtttggtgttgggtgcctgtaatcccagctactcgggaggctgaggcaggataatcacttgaacctgggaggaggaggaggtggcagtgagctgagatctcgccattgcactccagcctgggcaacaagagcgaaacttcatctcaaaaaataaaaaaagaagtctgggtgtggtggctcgtgcctgtaatcccaggactttgggaggccaagatgggtggatcatgaggtcaggagttcaagaccagcctggcctagatggtgaaaccctgtctcgagtgaaaatacaaatattagctgggcatggtggcacacacctgtaatctcagctactcagaagtctgagacagaagaattgccaaaacccgggagggagaggttgcagtgagccgagatcgcgccactgcactctagcctgggcgacagagcaagactccgtctcgaaagaaagaaagagaaaggaaattccccagggaagtacctcggcttatttcatgaagaggtactgaaggaagcagaggcatgtggaggacttccccacctcgtgcagctatttgggccgtggcgtctgaaatttcttatttcagagtcacccctttgatgaccttggcagtggactgcagtcatctgtttaggcctctccatggcccgtgtcaatgccgatatttctgtctgttgcacatttgatttccttgttgttggcatttagaaggccccctgtttcccagatcacaccacgggcatggaccgcagagattgcatcttgtgagtctgtagaaacagtcaaggccttgtcctctcttaggtccagagctcaggtgaatgcagattttcccggccatctgtgctgaagtccctgtggggaggctcctggctggtttcctgtaggtagacagctacacatcctgcccttcattggcttcttttcatgaagctcctgctgtctacaaaacatgtctcccttttcttcttgaaccacatctctgttattgaaactctagaagtcagccaggcacagtggctatgcctgtaatcccagcactttgggaggccaaggtgggtggatcacctgaggtcaggagttcaagaccagcctggccaacatggcgaaaccctgtctctaatacaaatactaaaattagccaagcatggtggccactgcactccagcctgggtgacagagcaagactctgtctcaaataaagaaagagaaagtatcatgcttttcagagttctgtgggttgttatggtgaattatcaaacctgaggacgtggtgggaacctccaaatttgcagccagttggtgagaagtacatgcggtctgtggacacccaagcttgcagctgcatctgaagcgagggcagcctagcgggggctggtggccttaacctgtggcatttgatgtaacatcagggagttgacatcagaattacgtcacacaggccaggtgcagtggctcatgcttataatcccagcaattagaaaggcaagataagaagattgcttgagcttgagtctgagcccacagtgagctatgaccgcaccactgcaccccagtctgggtgacagcacaagaccccgactccaaaaataaaaaagaaaaatcacaaagaattgcatggcagagtgcctgtctttcacagcttgaactgttgcaggaactttctttttttttttttcttttgtgatggagtctcgcgctttcacccaggctggagtgcagtggcgcgatctctgctcactgcaggctccgcctcctgggttcacaccattctcctgcctcagcctccggagtagctgggactacaggcgcctgccaccgcgcccagctaattttttgtatttttagcagagatggggtttcaccgtattagccaggatggtcttgatctcctgacctcatgatccacccacctcagcctcccaaagtgctgggattacagtcctgagccaccgcgcctggacttttttttttttttttgagaggggttggggagacatattctctgctagtgattctcctgcctggtctcgaactcctgctgggatcacaggcgtgagccaccatgcccagccacctttagagttttcttaccacctggttttcctctctcaatatctttctctcatttcctgctttaaaactctagcttggggtctgggcacagtagctcatgcctataatcccagcactttgggagactgaggcgggtggatcacttgaggtcaggagtttgagaccagcctggccaacatggtgaaaccttgtctctactatttttacaaaagttagtcagacgtacaggcggatgcctgtagtcccagctacttgggaggctgaggcaggagaatttgcttgaacgcggaggtgaaagttgcagggagccgaggttgtgccactgcactccagcctgggagacagagcgagactgtctccaaaacaaacaaacaaacaaacaaacaaaaaaaccctgtagcttgggatcagccttctcttctgttgtttttctttaaaaaataaaaattaaaaataggcttcaagtgatcctcccgccatgacctccaaaactgctgggattgtaggtgtgagcactgcacccagccgtatgtttttttctacataaaaaacagcacaggattatcttccaaagctaacaaatatgttcaaataaccacaaccccattaaggaaaaatgtcacttgacagcaaataatcaatccagaccacaatatgatcacactcactgtgaaggtgagaaaagttcatctttattatgtttccccaagagatgcactgcactgttctcttgaaaacacacagctcatgtcctcctttagaacacacatcctctttaaagtaacatacaaacatgccaaaacaagataaaaaattccatctgaattctcacatttcaaacatacactaaatatcaaataaaaatttatttttacaagaatttaggggaactaccacatagctataaatgtaatatatatgttaactaagtatcatagataaaaaccatgctcccttcagcagcacgtgtaataatagatacaaagattgaaaggtaaaagatttaggatgaaaagaatcctctcttaaaaaggaaaacaaaattatatgtatgtgtatacaacagttataatacccatcacacagctttatagaaacagcatctattcaaaaataccagtatttccaaaatatttaaaataatatttaaagtaataataatatttaaataaataaatatatttaataaatatttcagtaaataaaatatttaaataattctatacccatgtttttcaaaataaaccaataaaatagatagtatatattagacgtgttagtatatatatctgagacatgttaaaaatcacaactgaattctcacaagtcagtcacaaacctaaacagcaaataaaaatttctatcaccagaattatgtttttttctggtggggaactaccaatagctataaatagaagagattattatggaagtatcatagataaaaagagtgctcgcttcaggagcacatataataatacagaaaaaaatttaaagataataaaagatttaggataaaaagaattctcacttaaaaatgaaaagaaaattatctttaggtatatataacaactataactctcatcaaaaaactctacaggaacagcatgttttcaaaagtacaacaatttccaaactatttgaaataaacctattaataattcaatggccaacattttccaaacaaaccaataaaatgcatagtgtgcatgaagctatctgttacagtctgtggcactcatatttcacaaagaattctgtgccaatctgagcccctgcactgtgccttcaaatgctcctggactgtggcaaccaagtccataagaaacaggacctccaggttccgccccagggaggttggcattcagcaatataaaaagggaggtggtgccgcaggaaagggtggaactggaaacactcctggtttcttacttttctccaaggactcctagaagtaccccaccccacccctgctccttggaggacaacgtgatcactgtattcagctctgtcaagaatggtccaggttcttctagatgatctgcacaaatggttcctctcctccttcctgatgtctgccattagcattggaataaagttcctgctgaaaatccacatctcccctgggtccggtgttctggaagtgagagagacaatgtcacacttcaaggaggcagctctctagacaggaaggttattcacgtcccatgtcaagtctagctagagttcagagcaattgagaagtgcaattttatctcctgcctttcattctataccctgcttctgaaccatcgtgttcaactgtgaaactcacactttggtgaccctgactccaaaacttaatacacccaaggtcagccccagtgatctgcttcatagccaggactttgggtgggtcttcccagggagtagggcaccctcagagaatgtggctttggacttcatcacagctggggccttttgtgtcacttcagatctaaacttgtaaccgtgctagatctgtttctaacgtgacaacatcacgaaccacgagtccagaagcctaatccataatcctccctcctcatgacgaagtctcatgctctgtgctcaacatggttagctgcacaagatgtaaaccaaagcttcactgaaccctcgacccaaatcggtaactcaagtgcatcaatcataatgaacctccccgaactcagtatttatgattatttttgaggcagggtctcactctgtcgcccgggctggagtgcagtggcaggatcagggctccctgcagccccgacctcccaggctccagcgatcctcccgcctcagcctcctgagtagttgggagtagagatgcctcccacatcgcctggctaatttttgtatttttgtggagaggggatctcgccacgttgcccaggcttgaagccagatcaagcaattgggttccttggatttccgaaatagaccccaatattctgcctttaccccggaggatgcagatgtaccttctctcaggccgatgacctcaggcctccacggtccctggagctctaggaaaggtgggcgcgatctcgcgcccacacccagtgctctgggtcataagcctggatctggaaaaacaaacgcgctttgagaagacggggactccccaggatacccctctctcccctcgtccagcctccagcccacccgattcctccccacatcctccacgtccccaggccccacccacctcttccaactcctccagggaaacccaagccctgcagcgcatggaacaaaagaagtggaaccgatacttccggaacaaggctatctgagagcagttcttcctggccctcgggttcatgtaacggcataactggaaccaaagctcactgagcaagggtatatgagagcgggtctcctcgtacaggaagtagaagatgttttgtttgggggcctcgtcgtcctcctccatgtcattggccagatagctgaggacagaaatcaggttgctgctcaggggcaccaccaggagagacctccggctgaggtcagcttctcagagaggaaggtaagggaccgtccctagctcaggactggcacccaccctgcagagagccacgccttcctcaggagggctctgctggacagagacctgatcaagggcgtctcccactccttcaggatggagacaaaaacccaactggtgaccaagagtggtggcttatgcctggaatcccagcacactgggaggccgaagcaggaggatcacttgaggccaggagtttgagacaggcctgggcaacatagcaagaccctcgtctctattaaaaatataaaaaatacgccagacgtggtggctcatgcctgtaatcccagcgctttggaaggctgaagcaggtggattgcttgagaccaggagtttgagaccagcctggtcaacacagagaaaccccatctatactaaaaatacaaaaatcagcctggtgcggtggcacacccattagtcctagctactcaggaggctgaagcataagaattgtgtgaacccaggaggcggaggttgcagtgagccaagattgggcccctccattccagcctgagagacacagcaacactcttgtcttgataaataaataaataaataaataactgtccaggtgtggtggtacagccctgtagtcggagctaatcaagaggctgaggtgggaggatcgcttgagcccaggatatggaggctgcggtgagctatgatctcaccactgcactccagcttaggggacagggcaagtctgtctcaaaaaaaaaaaaaaaagcaattgaatacactgatattttgccaggaccctgccttctacaggcatctagtctaatgggactgggagtaatcaggggagatgacctaatcccaatgtcacattataataggatgtaactggagagctacgggcatgcagaagttggaagacgagggaaggcatcacagaggctgtggggtgaaccgacttcaaggaatgggtccttcccttcagaaccacatgtgtgtgggacacccagacagaaaacacaaatgcaaagtcaagtggagggcatttggaaggagcagtgaagccaagccaggaaacaccaagatggcgagccagtgtggttgtagagattgtagagagggtggaattggcactgtggaccctggcctcgatagagaaagacatcagctaaggaagttgttcaggtgggcagtgaggttgtcgtgctttggaaagatgttcaggctgcactaggaagccccctggcttggggagagactccaggaaaccccagcagggagcatttgacagtggattcgagtgatgcaagggggacctggactgtgacctctgtcacgggaacccggaggaggctgatggcttttgcggttgatgtgggaaggagagagaacaaccggaaacgtctgcttgctgggggaagtgtcatgtccgctcctccgctccttttcttctccccttaggagcggttcatggttccttttgttttttgttcttttttttttttttttttgagactataatcctgtcttttttgtacacagagtaaagaggacaaataggtgaaagaataaatgaaaggctggaatcccacttcccccgctgtcccagggcattggatattgatggataggaggcagcaaaccactcacagagccaggaagaaatgaatgcgttggtattgccaggaggggaggccggcccggctgaaatacgctatgaccatagccaggagatactgatggagagaaaggaacacagagagggagaggtcacatcttgggagaggaagattgtggatatagtggaatgggggtctggggaggggttgcccatcagagaagggacctcagtgttggggtgactgtgctcatgtggaaattgcggggtggaggggtattcgaaggtcggatgcaaatccgagaagccggaggaagggtttttggtgatgctcccaggatggtgggctccgatgggatctttggagggggtgtgtctaggtcggctggtgtcaggagggtcttttgtgtgccaggcagagaactgtcccaaggagctgagagtagagggcccaggagcttcagggctgcagccagactgtggcccagggctcagatcccaaaggacccataggagaggcaggggccactcattcactctgcaagagaccagcagaatcctgacggagatgctgacaaatcataaaaagacaaagaatagccgggagtggcagctcaagcctgtgatcccagtactttttgagaggtggagacaggaggatcatgtgagcccaacagttggagaacaacctgggcaacacagcgagaccctgtttctaagaagatttcaaaaattagttgagcatggtagcatgtgcctagtcccagctcctcaggaggctaaggaaagaggattgcttgagcccaggaattagagtgagctatgatcatgccactgtactccatcctggggagcagagctggactctgtctcagaaaaaaaaatgtgtgggtgccaagactcaagaccatgggagctggtcagacacagtgctgacgtctgtaatctcagcactttgggaggccaaggcgggtggatcacctgaggtcaggtgttcgggaccaatctggccaacatggcaaaaccccgtctctactaaaaacacaaaaattagccaggcgtggtggttcatgtttgtaatcccagctgcttggaggctgaggtgggagaatcgcttgaacccaggaggcatcagctgcagtgagtcaagatcgagacactgccctccagcctgggcagcagagcaagactgtgtctcacaaaaaaaaacaaaaacaaaaacaaaaaaaaactgtaggagcatctggtgggaggtggtggacggagaactgtgggtttggaagctgcgccctccccctggccgtgcgttagaacaggaacacagttacatagagaacaaccttaccttgtccgacaccctcagatctttgtcccaggccaggagtcttttaatgacaggatcctctgtgattagagagcagatgtcagtgtgagaagcaggacagggtttccgtgagagcagcagggcagcgaggagaagtgtgcctcccgggggaaagtctcaggattgtggccgcgggtgaggtggatgagagaggggagaatgactttcactgggcaagggagagaggctcctgctctgagactcccctgagaagaggccgaaggaggccctgggtgtgagaatctacaggatgtagagctgggaatcagccaggaccccctccagcagacacggagggaccactgcagagtcataaaggaattcccatcatttcctcatgagacagtcacacatcagggtgtgaccatggccttgggatcccccactatggatggagacacttaggtttagcaaagtcagtaagaaacattaagtttcagagggcacagctgaaaccacttttttgatttttgattttgtttttctttatttgatttttatttttatttatttattaatttattttgagacagagtcttgctctgtgggccaggctggaatgcattggcctgatcttggctcactgcaacctctgcctcctgggtttaagcagttctcctgtctcagcctcccgagtagctggaactacagggatgagctactgtgcccagccttggtttttcttttgacgcagagttttgctctgtcacccaggctggagtgcagtggtgcagtcatagctcactgcagcctcaaagtcctgagttcaagcaatcctcttgcctcagcctcccaacgtgctgggatctcaggcgggagccacagcgcctggcccaaaaccaagctttcttatcccaagcaccgacctttatcaagtctacctaatcctctgttgtctccttaagtgtccctcatgagtgatcacttcagagtcctcccgcatggagagctcacccactggggcatatttttcccattggaaaagtgtggttattggaagtttcctctttagaaagaacaggattggaggtgctctctggggtgtcctcctaccaagcagcctgttgaaggcctcgtagtactcagggagcacgagcgacactcgccgtcgcttcgccttcatcttgaggccacacagcgtctccgccacccaggtctcctcaggctcaggggcgagctccttctctggctcatcatcagattcatccaaacattctctcttccttttccagccaagggacctacgtggggggctgggatctacccccaggggctgagtaaagaaaccaggccaccgtgtaatgcttctgcaactgatcacgttagaccccgaccccaaaccccaaaccactctccatcctccccagcctcgcagactgctggcttctccaagccacctttctgactttctcctctgctcaaccccatgtgccactccttcccctccccattcttccctctctctgtcctcagaacactgcctcatatccttccctggtccctggctctctgagtccctctttttttttttttttttttgtttcgagacagaatcttgctttgtcacccaggctggagtgtagtggtgcaatctcagctcactgcaacatgcatctcccggattccagttattctcctgcctcagcctctcaggtagctgggattacaggtgcctgccataatgcccagctccattttgtacttttaatagagacagggtttcaccatgttggccaggctggtctcaaacccctggcctcaagtgatccgcctgccttggcttcccaaagtgctgggattacaagtgtgagccactgcacccagcctgaatttctccattcttcccacacaccctccccaggttctccttcctgacctctgacccttcttttttttcttcttttttttttttttttttttttttttttttttttgagatagcatctcactctgtcacccagactggagtgcagtagcacgatctcggctcactgcaacctcttcctcccaggctcaagtgattctcctgtcttagcctcccaagtagctgggattataggcacacaccactaccgcctggctaatttttgtacttttagtagagatggggtttcaccatgttggccaggctggtcttgaactcctgacctcaggtgatctgcccgcctcagcctcccaaagtgttggggttacaggggtgagccaccacgcctggcccccttccttcatcttagtcaatcctatgccacctcttcttcctccagtcccctcacctgatggtcccgacacttcatcatccaccacctcctggagggggtaccctgaggtgctccgctgggggctccgctcttcctggggctgcggttgatggctcatcatgatctttcccaaaatctgtcccatctcaccaaacctagtctctgttctgtccttggtcttcttctggacactgctgggatccagaagagtgtgttatcaattctcgaggctgggagaagtcaggagtggagaacagctctgagaagttactgttgtccaactgaactcccaggtgccgacagagtccggtccctccaatcaggaaggtcggaatctctgatgtcatcgctcatgccaacctggcaaccagtttgaaaaaaaacacatgtaactgccaggctgatctcttgtcctggagatcctgggtgaatggtatctcctgccactgtcccaacctcagaccactgtccaaaagcatcttcagggtctccgcatccctctgttccctgtcccagcagaggctgtgtcctctccactcaaagcttgaagcgtgttggggtctcctcttctctgtacatgcccgtttcagagtccagtctggtgggagagggatcaggatgggaaagaaaagtagggtaagcagaaacgatgaaaccttacaagagtgagattatcatgtacaagagatcccaggaacattgacttgatgaaaaagtcacatcagagcactcaatttggcagaggttttctgccgagtgtctactgacattcactgtccgagattctgtactgggggtacacgcgtcctctgccctaaggcatctttgagtccaagagatattttgaggactggaaatcataggaaactgcccatgagttcacacatatttccaatggtgtccccaatttcagggagtccacggatcacctaaagccagcccctccagtttggctaagaaactctatatatcaagttttgtatcatatgtattgctcttaactcagaaaattccaccatttatagcagtggtttatttatttataccattgaaggaaatggtttatttatgaatctatattatggatattctataagatactgggtgtacaaaaagactaagtcgaaaaatctcagctgtgcacagtggctcatgcttgtaatcccatctctttgggtggccaagggaggaagactgcctgaggccagcagttcaagaccagtataggcaacatagcaagagcccatctctaaaacaaaacaaaacaaaacaaaacaaaattagccaggtgtcgtggctggcacctgtgttccaacaacttgagagactgaggtggcaggaggattgcttgagcctaggagttaggggctgcagtgagctgtgatcgtgacaccgcactccagtctgggcaacacagcaagaccttgtgtcaaaaaaatttttttaattaaatataaaagagtttcatgacattcagagaccatccaaagaacctgtgggttccggccaggcacagtggctcacgcctgtaatcccagcgctttgggaggccatagcaggtggatcgcttgaggtcaggagtttaagagcagcctggccaacatggtgaaaccccatctcttctaaaaatacaaaaaattagtcaggcatggtggtgggtgcctgtaatcccagccactcaggaggcggggacagcagaatggcttaaacttgggaggcggaggttgcagtgagccaaggtcacaccattgcactccagcctgggcaacaagagcaaaactacatctcaaaaaaaaaaaaaaaacaaaaaaaacaaaaagaacctgtggatgagttcccacatggcttcctaacgggctgcggctctcctaggagtctctcgctcatgggaaaggcacaaactgaatgcggaaggaaatcccattgctgtggaagtcccattgttaggaagctctgcttttctggagttcaaatttgcattcatgacgctttaaaccgtcagagctgggtgtgtcctcctacaacaaatcactttactctctctcctggttaacaggctttcaaatattagaacatccatgttctgacctcattaaaattgctcttttgtggaatgaaaagctctgatttaacccgtctttaagcctggtatgcatattcctctctgttccggccaccttgtctagacacactacactgaggcagtgcccatcttagatgatgttgatacattgtcaaaaaatgggcaaaccaggtgcggcggctcacacttgtaatcccagcacttttggaagctgatgccgacagataaccagaggtgaggaggttgagatcagcctggccaacatggtgaaacctgtctgtttttctgtaaaaatacagaaacaatgagctgggcgtgggagtgcacttctgtaatcccagctacttgtggggctgaggcaggagaatcacttgaaccgggaaggtggaggttccagtgagccgagatcacgacactacactccagcctgggcgacagagtgagactccgactcaaaa

SEQ ID NO: 1818 - DNA, 12247 bp, Homo sapiens
tcaagaccagcctgggcagcctagcaagatcccatcccttaaaaaaaagtttttaggctgggcatggtcactcatgcctgtaatcctagcactttgggaggccaaggcaggcgggttgcctgagctgaggagtttgagaccagcctgggcaacatggtgaaatcctgtctctactaaaatacaaaaaattagccaggtgtggtgttgggcacctataatcccaggtactcaggaggctgaggcaggagaattgcttgaacccaggaggcagaggttgcagtgagccgagagcgcgccactccactccagcctggacaacagagcgagactccgtctcaaaaaaaaaatgtttttaattagccagctgtgatgatgcatgcccatgtcccagctacttgggaggctgaagcaggaggattgcttgagcctgggaggtcaaggctgcagtgagctatgattgcgcccctgcactccagcctgggcagcggagggagaccctgtctgaaaataaaaaaagaggtgggggcctatgaccccccctttaattttggcccaaccttagtaacaggatagtcattgagtagggcaaaagtgatgttatgatgtttttcagcctccaatttacagtctaaaacatgtcttgggtaaacacagcaagactccatctcaaaaaaaaaaagaaaaagaatcagaagtgaacctgtagcctgtagtgtgttgccaaataaacttatttttagagatacttctttccattttctgtgaggtcatctgcagtttcacatggtagacagacttaggtgagattcttagcaacatagaatgaagagtaaagaggtttgtttatttcacaagggtttattgaaggcctacgatgtgttaaatgctgtaggaaatacccactgatttctcttttcatggaggtttcccgccttctcttaacgagtgatcaattaaactgtttactgggaacttgctaagttaatgaacacacgggatacattctttggatgagcagacattggttgggcagaggggcaagaggagagcagtttagacagagacctgcttatacactgtagtgtctaaaagagcttgtgatgttcaggaaacagttgttcactgtgctgcaatataggggacggccagttgcggtggctcacacctgtaatcctagtgctttggaaggccaaggcgggcagatcacctgaggtcaggagttagaaaccagcctggccaacatggtgaaaccccatctctactaaaaacacaaaaattagctgagtgtaatggtggatgcctataatcccagcaacttgggaggctgagacaggagaatcacttgaacttgggaggtggaggttgcagtgagccgagatcatgccattgcactctagcccaggtgacagggtgagactctgtctcaaataataataataataataataataataataataataataataataatgtaggggacttgatgaagggaaaggattagagagattctgaaaagaaggtagtttggggcccagtgatgactagattttaagtttcatatagtaggaagtggggcactagtaatttttcaagcagaaaaattatttgaccagattcgtgatttcaaaaatagctctggtgatagagtggaggatgggttggagcagggaataaggggaaatgaaaccgttataaaactcttaaagtgggctgggcatggtggctcacgcctgtaatcccagcactttgggaggctgaggcgggcggatcacgaagtcaggagatcgagaccatcctggctaaaacggtgaaaccctgtctctactaaaaatacaaaaaattagctgggcatggtggtgggcgcctgtagtcccagccactcaggaggctgaggcaggagaatggtgtgaacccgggaggcagagcttgcagtgagctaagattgtgccactgcactccagcctgggcgacagggcgacagagcaagaatccgtctcaaaaaaaaaaaaaaaaaaaaaaaaaaaaaaaaaaaacctcttaaaacaagtacagcaagaactttgagggtctttgctaagacagcagctggcagcttcaatttggagtagggtatcaaaggcaactgtgtataaggaatagttatataactggtatccaatttctgagatgattttgacttaaacattgtgtatttcccagcatactgttggtttttctaattatgtgggaaattatgttgcttttacttttttttttgctcattgcccagcctagggtgcaatgctgcaatctcagctcactgcaacctccgcctcccaggtttaagtgattcttctgcctcagcctcccaagtagctgggattacaggcgcccaccaccatgcctggctaattttttgtatttttggtagagacagggtttcacgacgttggccaggctggtctcaaactcctgatctcaagtgatccgcctgcctctgtgtcccaaattgctgggattacaggcatgagccaccgcaccggccatgctttcagttttcaagaaagaagacaccattattgccaaagattttggtaatttgagagatacaatgtatgttttctccatgtggatactagatagtaaggatgtgttgaatttgaagtgtctatccagaagtattttgggtacttgtttaaggattgtaaaacaatgtttccatttctggatataataaatgtatttgttaatataataaatgaatagattagacccataaactatttgcagtgttgagtcatttcccacagttaaaatcaggatgaaaatatatagctgaatacttgctttgtttcttgtaactgatttctttagtacagaacctgctaaggccatcaaacctattgatcggaagtcagtccatcagatttgctctgggcaggtggtactgagtctaagcactggatgaagaagatagtagaaaacagtctggatgctggtgccactaatgttggtaagtttgggagagttttaagccacaagaaatgatcagtgaatgttgttgtagtcaagaaacatttgttattgaaataagactatcaagtgttgatgtagtaataagttattatttttaagttaaagttagcacctattatgtgcctagtacttagctaggtagtaataataataacgacagcttttcttgtgttcttatggtgtgccaggcaggtgttatgctaagaattgcacagaaatatttaatttgcagaatagctgggcgtggtgtctgacgcctgtaatcctagccctttgagaggctgaggtggggggattgcttgaagccaagagttcaagaccaacctggccaacatggggagacctcgtctctattaaaaaataaagcaggccgggtgtggtggctcacgcctgtaatcccagcactttgggaggccaaggcgggtggatacctgaggtcaggaattcgagaccagcctgtccaaaatggtgaaactctgtctctactaaaaatacaaaaattagccagacctggtggcagaagcctgtaatcccagctactggggaggctcaggaatgagaattgtttaaatttgggaggtggaggttgcagtgaaccgagattgtgccactgcacgccagcctggggacagagcaagactctgtctcaaaaaaataaaataaaataaaataaaataaatcctggagtagtggctcacatctgtaatcccagcactttgggaggctgaggggggctgatgctttgaggtcaggagttcaagaccagcctaaccaatgtggtaaaaccctgtctctactaaaaatacaaaaattagccagatgtgatggtgcatggttgtaatctcagctcctcagaaggctgagggaggagaattgcttaaacctgggaggtggaggttgcagtgagccaagatcgattgtgccactgcattccagcctgggtgacaagagcaaaagtccatctcaaaaaattaaaaaaaaaaaaaaaaaaaggaaagaaaaaaaagaaaatgacaaaattaaaaaaaaattattaatctgccaaataactttatgagatagaacttattacctccattttacagttgaggaaattaagggacagtaaatttcctttttttgagattataaagctaataaaatagaatctaggaagtctgattccagaaccagttctgtttttttttcttttttttttttttttgagatagagttttgctcttgttgccgaggctgcggtgcaatggcacgatctcaactcactgcaacctccacctcccaggttcaagcgattctcctgcctcagcctcacaagtagctgggattacaggcatgcaccaccacgcctggctaattttgtatttttagtagagatagagtttctctacgttggtcaggctggtctcgaactactgacctcaggtgatccgctcgctttggtctcccaaagtgctgggattacaggcatgaaccactgcgcccggcccccgttctccttactgggtatgttaaaattatttctttcaaaggaaaaggctggtcaaagtgcaacggtctttacaactaattgatcacaaccagttacagatttttttgttccttctccactccaactgcttcacttgactagtgtaaggaaaaaaaaaaaaaaagaggaaagaaagaaaatgctaaactatttaatctgggctagtaaatggccagaaagaactttataaaaatgaaatatacaaaatgacactagtatgtttaactaaaggtatagttacgacacttaaatttgcacgttataaataatatcaatataaaaactgatagcgtgggtccatttttaataaatatataaatattttaaactttctagatctaaagcttaaggactatggaatggatctcattgaagtttcaggcaatggatgtggggtagaagaagaaaacttcgaaggcttaagtaagttaactttctaatcctattataaaataattgggccacatgtcttagaattttgagtaacactgtcttgggaaacacaaaaacagttttttaaagccagttactagatatcatgtatatttgttgttatagcacttgagatatcttagtccttactttacagtctctttcagctctgaaacatcacacatctaagattcaagagtttgccgacctaactcgggttgaaacttttggctttcgggggaaagctctgagctcactttgtgcactgaggtgataaaatatttttatccattcacttgaccccttagaaaaacctctctgaaaattaattggaatcattattatttacaattttctatctcaatatctcagcttctagcttctgaattctgttttgtctcacagccaatctaagtcctagtacttctgaaatgtgagcaataaatgaatgaaatgaagcaaatagtattgtttaaaaaattggttacccttattaaaacagtaacttctcaatttgaacataacatatagataataaatgatagttaccattggttttcattatcaatttttagggaaacatttcaccaaagcactatttaattatagcacagatactaaatttttataaataattacatgcacacacacatatatacatatatatacatatatatacatatatatacatatatgtatacatatatatacatatatgtatacatatatatacatatatacatatatacatatatatacatatatacatatatatatacacacacacatatatatatatatatatatatttttttttttttagacagagtcgcactctgtcacccaggctggagtgcagtggcacagtctcagctcactgcagtctctgcctcccaggttcaagtgactttcgtgactcagcctcctgaagagctgggactatagcgtgcaccaccactcctggctaatttttgtatttttagtagagatggggttttgccatgttgcccaggctggtctggaactccaggcctcaagtgatctgccctccttggcctcccaaagtgctggaattacaggcacgagccaccgcaccctgccctacatatacattttaattataatatcttttggattctttaaaaaaatttttaaaaattttaaaaaattctttaaaaaaattcttttaaaaaattttgtttgaagagtaataacaaaacaaatctctatttgagaatcaataaatcttgagatcatttatggttttgcaattcaacctgaaaaatgaagtcagagcttttatcaaaacaaagcatgtttagtgctctctgtctcactgtcttttagatgccagaccttagattttgtgatgactcctcaaccgtttagatctcggttatctcagagggatcatcagctttttaagaaaattttgagagaaaagcaagtgaagaaaagagtagtcagtgcccaacatcacggatctctcactgaacacaccatgcctggtattctctcacagtgatgtcaccatttctacctgccacgtatcggcgaaggttgggactcgactggtgtttgatcacgatgggaaaatcatccagaaaaccccctacccccaccccagagggaccacagtcagcgtgaagcagttattttctacgctacctgtgcgccataaggaatttcaaaggaatattaagaaggtacagtaaattaatcctggttttcaagagtattggttaatgcacacgagcaaaagatttactaaagatgtttattcttcagttgattctcttcccataatttattgagaaatgctttatttgcatttctcattaaagacttaacttcaggatgatttacttttttctttttatcacataatgtttattaggactgggaaacatagtgagactctgtctctatgaaaaattaaaaaaaaaattgactgggcatggtggcatgcacctgtagttccagctacttgggaggctgaagtgggaggatcacctgagcccaggaacttgagactgcagtgagctatgattgcgtcaccacacttcagactgtgagacagagtaagaccctgtctggaaaaatatatatacatatatatacattttttttattttttatttttatctttttttgagatggagtctcactttggcgccctggctgcagtgcagtggcgcgatctcagttcactgcaacctccacctgccaagttcaagcgattctcctgcttcagccttctgagtagctaccattacaggcgcgcgccaccacgcccggctaatttttgtattttcagtggagacggggttccaccatgttgtccaggctggccaggctggtctcgaattcctgccctcaggtgatccgcccacctcggcctctcaaagtgctgggattacaggcgtgagccaccatgcctgaccttatgtacttatatttttatgagaatatttctcttggttttctgataaatgagttactggcacccttatgaatttgaatgcaaatgaaacagctaaatgttatataattgtcgtgtttaaaaagcagattataaaactgtctgtattatatgattacagttttataaaaacaaaacaggcctaaatgtgtatagtataaagactgaagagtcagcacttccatgttctcagcggttatccttggatgtgagatctcatgcactttttgctctcttctttgtgcctttccattttgcatgcgtatttcttataatctaaaaagttacttaaacatatgcagctaaaaactttttttacttgtaaagcgtttggtgctaattttaacttttttttttagacggagtcttctcactctgtcgcccaggctggagtgcagtggtgtgatcttggctcactgcaacctccgcctcctgggttcaagtgattctcctacctcagcctcccaagtagctgggattataggtgtgtgtcaccacacccagctaatttttgtatttttagtagagatggggtttcaccatgttggccaggctggtcttgcacccctgacctcaagtgatctgcccacctcagcctcccaaagtgctggggttacaggcgtgagccaccacgcctggcttttttttttaaagcttttttgtaagtcagccagcaagaacacaggaggaagtactcaaatctcccttacacagctgggggctatgtcaggttttataagcatagggtaatgaggtgtgatttgattggatcttgcaataaagtaatgctgggaggtgtgatctgactggatcctgccatggggtgacaccaaaactcaatctgattggatcctggctcctgcctgggggtgtctggttcttaaatcggtccgagctcttcaggctgagctcttaggttccactccacggtggcacgcgtggttaacctgggcatgcacagggtacatgaccttcaacctgcaggtcgatggcaattggaaaacaactgacaacttcattacataaaagttgaactgattcgggtgcggtgactcacgcctgtaatcccagcactttgggaggccaaggcaggtggatcacctgaggtcgaggagttcaagaccagcctggccaaaatggtgaaaccccgtctctactaaaaatataaatattagccaggcgtggtggcgcacccttgtaatcccagctaccccagaggctgaggcagcagaatgcttgaacctaggacgtggaggttgcagtgagctgagatcgtgccattgcactccagcctgggtgacaagagtgaaactccatcaaaaaaaaaaaaagttgaactagatttggtctgatgcagttacagatttacaaaccgcgtcccaccctcctgccaacaccttccactcctcattcttgagggattagggatggaggtcatgcttctgtatcgacttcatgctgaccaggggcacttagtcccctaaagtgagaggaatgaaactcttgggcttctgagttcagatgagttctggggtcacccggagtagcttgaaaggctggtattgttgtaatacaagctgaaggtggaagtgttggatcctggaggacaaacagctcaccatccatttaaataaataggaccaaaaagtaacggaacagtggccacgaggggccccaacagaggaagaaaccaggtgaggtgtggtatagtggactcgactgccttctaaatctcagtggttgtccgggtgcggtggctcacacctgtaattccagcaaaagaagagccgaggcagggtgatcacgaggtcaggagttcaagaccagccgggcaaacatggtgaaaccccgtctctactgaaaatacaaaaattagccaggtgtggtggcgtgtgctgtagtcccagctactagggaggctgaggcaggagaattgcttgaacctgggaggcggaggttgcagtgagccgagattgtgccactgcactccagcctaggtaacagagcaggaccccatctcagtcaatcaatcaatctcagtggttgaactacccttgatatggttcagctctgtatccccaaccaaatctcatgtcaaattgcaattcccagtgttgagggagggacctggtgggagatgattggctcatggcggctgacgtcccccttgctggtctcgtgatagtgagtgagcgctcatgggatctggttgtttagaagcatgcagcacctcctgcttcactctctctgtctctcctgctccaccatggccagaaacgtgcctgcttccccttcgccttctgccgtgattgtcagcttcttgagggctccccagccatgcttcctgtacagcctgcaaaactgtgagtcaattaaacctcttttcttcataaattccccagtttccagtagttctttatagcagtgtgaaaacagactaatggacccttctggttgaaggaatgtagccattctgcttgtttaagtatttcctttctattcatctctatttcccgggaggtgtttatccaagtgcaataggagatattggtgactgcagagtcccctcagtgttctgctagtaaatagttgaaggttgatcagtgatctccagcattttcagtctggcatggaaaagcccccatgtaactggtaaaggtatcagtaagcaccaggaggtatctaaatccaccaggagccataggcatcatgttgatgtccatttaccagtcttccctggcaagattctctgaattgtactgccttggccaaaagaggtatgggaggggctgggcacagtggctcacgcctgtaatcccagcattttgggagaccaattcgggtagatcattagaggtcaggggttcaagaccatcctggccaacatggtgacattccatctctactaaaaatacaaaaagtcagcggggtttggtgttgggtgcctgtaatcccagctactcgggaggctgaggcaggataatcacttgaacctgggaggaggaggtggcagtgagctgagatctcgccattgcactccagcctgggcaacaagagcgaaacttcatctcaaaaaataaaaaaagaagtctgggtgtggtggctcgtgcctgtaatcccaggactttgggaggccaagatgggtggatcacgaggtcaggagttcaagaccagcctggcctagatggtgaaaccctgtctcgagtaaaaatacaaatattagctgggcatggtggcacacacctgtaatctcagctactcagaagtctgagacagaagaattgccaaaacccgggagggagaggttgcagtgagccgagatcgcgccactgcactctagcctgggcgacagagcaagactccgtctcgaaagaaagaaagagaaaggaaattccccagggaagtacctcggcttatttcatgaagaggtactgaaggaagcagaggcatgtggaggacttccccacctcgtgcagctatttgggccgtggcgtctgaaatttcttatttcagagtcacccctttgatgaccttggcagtggactgcagtcatctgtttaggcctctccatggcccgtgtcaatgccgatatttctgtctgttgcacatttgatttccttgttgttggcatttagaaggccccctgtttcccagatcacaccacgggcatggaccgcagagattgcatcttgtgagtctgtagaaacagtcaaggccttgtcctctcttaggtccagagctcaggtgaatacagattttcccagctgtctgtgctgaagtccctgtggggaggctcctggctggtttcctgtaggtagacagctacacgtcctgcccttcattggcttcttttcatgaagctcctgccatctacaaaacatgtctcccttcttgaatcacatctctgttattgaaactctagaagtcgaccgggcatggtggctatgcctataatcccagcattttgggatgccaaagcgggtggatcacctgaggtcaggagttcaagaccagcctggccaacatggcgaaatcccgtctctaatacaaatacaaaaattagccaagcatggtggccactgtactccagcctgggcgacagagcaagactccgtctcaaaaaaaaaaaaaaaaaaaaaaaaaaagagaaagaaagtatcatgcttttctgcattctgtgaattgttttagtgagttatcgaacttcagggcatggtgggaacctccaaatttgcagccagttggtgagaagtacatgtggtctgaggacacccaagcctgcaggtgtgtctaaagcgagggcagcctagtgggggctggtggccttaacctgtggcatttgaggtaacatcagggagttgacatcagaattgcatcacataggctgggcgcagtggctcacgcctgtaatcctagcactttgggaggccaaggcggagagatcacgaggtcaggagatcgagaccatcctggctaacacagtgaaaccccgtctctactaaaaatacaaaaaattagccaggcatggtggcgggcgcctgtagtcccagctactcgggaggctgaggcaggagaatggcgtgaacccaggaggcggagcttgcattgagccaagatcacgccaccgcactccagcctgggtgacagagcgagactccatcccccccccaaaaaaaaaaaagacaaaaaacagaattgtgtcacacaggccagatgcagtggctcatgcttataatcccagcaatttgaaaggcaaggtaagaggatcgcttgagcttgagcttgag

SEQ ID NO: 1819 - DNA, 979 bp, Homo sapiens
gtcaggagttcaagaccagcctggcctagatggtgaaaccctgtctcgagtgaaaatacaaatattagctgggcatggtggcacacacctgtaatctcagctactcagaagtctgagacagaagaattgccaaaacccgggagggagaggttgcagtgagccgagatcgcgccactgcactctagcctgggcgacagagcaagactccgtctcgaaagaaagaaagagaaaggaaattccccagggaagtacctcggcttatttcatgaagaggtactgaaggaagcagaggcatgtggaggacttccccacctcgtgcagctatttgggccgtggcgtctgaaatttcttatttcagagtcacccctttgatgaccttggcagtggactgcagtcatctgtttaggcctctccatggcccgtgtcaatgccgatatttctgtctgttgcacatttgatttccttgttgttggcatttagaaggccccctgtttcccagatcacaccacgggcatggaccgcagagattgcatcttgtgagtctgtagaaacagtcaaggccttgtcctctcttaggtccagagctcaggtgaatgcagattttcccggccatctgtgctgaagtccctgtggggaggctcctggctggtttcctgtaggtagacagctacacatcctgcccttcattggcttcttttcatgaagctcctgctgtctacaaaacatgtctcccttttcttcttgaaccacatctctgttattgaaactctagaagtcagccaggcacagtggctatgcctgtaatcccagcactttgggaggccaaggtgggtggatcacctgaggtcaggagttcaagaccagcctggccaacatggcgaaaccctgtctctaatacaaatactaaaattagccaagcatggtggccactgcactccagcctgggtgacagagcaagactctgtctcaaataaagaaa

SEQ ID NO: 1820 - DNA, 14426 bp, Homo sapiens
cccaccacacttggggaggcctccggatggatatgtccttccagctgatggacctcaggattgggagaaagatcggggacaagagacgggcacaacagtcacctggtttctttttcttcctttattttttgagactgagtctcgctttatcacctaggctagagtgcagtgacacgatcttggctcactgcaacctccacttcccaggttcaaatgattctcctgcctcagccttccgagtatctgggattacaggcgtgcactgccatacccgactaatttttggattttagtagagatggggttttgccatgttggccaggctggtcttgaactcctgacctcaagtgatctgcccaccttggcctcccaacgtgttgggattacaggtgtgagccaccgtgcccagccacatggtgtcttccgtgacagctccctctctgctgaaatagcatttcccacccccacccatggcatcactcttctgctgccattttcatcaaagactgatgtcacttggcatgtttttaggtttttttctggtggcttttatttttttaattttagagatgaggtctcactatgttgcccagcctagtctcaaattcctaagctcaagggatccacctgcctctatctcccaaagtgctggggttacaggcatgcaccaccacgcctggaccacattgcatgcattttatttaaatttttttttttttttttttaagacggagtctcattctgtcacccaggctgaagtgtagtggtgcgatcttggctcactgcaatcccgggttcaagcaattctcctgcctcagcctcccgagtagctgggattacaggcgtgagccactgtgcccggcctttatttaagatttgcctccttaaccattacacctgtaatcccagccctttgggaggctgaggtgggcagatcacctgagttcaggtgttcaagaccagccaggccaagatggtgaaaccacatctctactaaaaattccaaaattagccaggcgtggtggcaggcacctgtagtcccagctaatcagaaggctgaggcaggggaattgcttgaacctgggaggtggaggttgcagtgagccaagattgcaccactgcactccagcctgggcagcagagtgagactgtctcacaaaaaaaaaaaaaaagaagtgtcaggtgctggcagagacactgcttttccctaattgacccgtttggtcctcacattaaccatattttacagctactctcatttacagataaggaaactgggccaatgaggaggtgagaaatcgctcaaggctgccaggtacagtggctcatccctgtaatcccagcactttgggaggccaagggaggaggattaattgaggccaggagtttgagaccagcctaggcaacataatgagactctgtctctacaaaaaatttaaaaattagtggggtgtggtgatgcatgtgtagtcccagctactccggaggctgaggtgggaggatcgcttgatcccaggtgtctgagacagtagtgagctacgactgcaccactgcactacaacctcggtgatgcaatgagatgctgtctcaaaaaaaaaacacacacacacacaaaacaacaaaaaaacaaattgttcaaggcgagcctggtgtgccaagcccttgttctgggcacttggcttatattatctcccttaatccttcccaccaccccaagtgctagatactgggattaatttagttgagctgtaatacatcaatactgtgtgaaatgctatgcaacatctaaaaggaagacaggtggagcttttatttattttttattttatttattttttgagacgcagtctcgctgcattacccaacctggagtgcagtggcacaatcacagctcactgtagcctcaacctcctgggttcaaacaatcctcccacctcagcctctcaagtagctgggactacaggcttacaccaccaagcttggctaatttttttttttttttaagagatggtgttttgctaagttgcccacactgatctcaaaatccttttgtttttgctttggaatggtctggaactcctgagctcaagtgatcctcccaccttggcctcccaaaggcctgggattacacgtatgagccaccgcaccaagcccaggttgagcttttaaggtattaaagatccactaggtgaaaaaaaagagtgaaagatacatatgccatttaagggaagcacaggaaaactcctattttgtttatatgtgaatagaggcgcatagatgcctagaaaagtgtctgggagggaatgaaaccagattggccacaaaaatcacctctggaaaaaggaaaagaatggggactttcactttttgcttcatatgtttcatgcacctttttttttttttttttttgagatggagtttcactcttattgcccaggctggggtgcagtggtgcaatctcagctcactgcaacctctgcctcctaggttcaagcgattctcctgcctcagcctcccgagtagctgggattacaggcatgcgccaccacgcccggctaattttttgtgtttttagtagagacgaggtttctccatgttggtcaggctggtctcgaactcctgacatcaggtgatccgcccaccttggcctcccaaagtgctgggattacaggcgtgagccaccgcgcccagccgctttttctttttaaaaagtaaaatataacagagaaaactgcacaaaacagaagtgttcaaattaaattttttttttttgagacagggtcttgccctgttgcccaggctggagtgcagtggctcattcatagctcactgcagcctcaaactcctgggttcaagcgatcctcccaccccagcctcctgagtggctggaaggccaagggaggatcgcttgagcccaggagtttgaggctgtgccaccacacgcagctgggtttttttttttttttttaattttttgtagagacagggtctcgctatgtcacccacgctggtctcaaactcacgggctcaagcaatcctcccatctttggcctcccaaagtactgagactacaaacatgagccatcttgcccagcccctagaacgtgttatcaaataaacaccgatgcaaccctcactcagccgagaagtaaaacattgccagccaatccctaaatgcttctgcttgccgcttcccaatcctaaccaatgccttctcctgacaattatgatggtcatgtctttgcatttctctaatgtttcccatcacgatcaaactagttttgttttgcctgtgtccaaactttgcataaatgagcagcatgtgtctggtggacctggcttcttccactcaacattatgataagaagattgaccatttggtgcccatagctattgctcttgcattttcattgctctatagattcttactcaacataccttaaaattttttttattctgaaataagagcgggatgctattaaaaaaagaaaaaagaagagaacaaaaaagtcctccagtaaatttaaaatatggtagtcaaggccgggcacggtggctcacacctgtaatcccagcactttgggaggctgaggtgggtggatcacccgaggtcaggagttcgagaccagcccggccaacatggcaaaaccctgtctctacgaaaaaaatacataaatcagccaggtgtggtggtgtgcacccgtaatcccagctacttgggaggctgagacatgagaattgcttgagcccgggaggcagaggtttcggtgagctgagaactgccactgcactccagcctgggtgacagaatgagactataaaagaaagaaagagagaaagagagagagaaaggaaggagagaagggaagggaggggaggagaggggaagggaggggaggggaggggagagaaggggaagggaagggaaggagaagggaaagggaagggaagaaaattagagattaattcaggagattcaacatccgcctaatagaaattctagaaagaggaaggagagaatagagaggccaggtgcagtggctcacacctataatctcagcactttgggaggctgaagtaggaggattgcttaaggccaggagtttgaggctgcagtgagctatgattgagccactgtactccagcctggaaaacaaagcaagacctcgtctctaaaagtaataatacgccgggacggtggctccccacactttgggagcctaaggtgggcggatcacttgaggtcaggctttcgagatcagcctggccaacatgatgaaacccaatctccactaaaaataaaaaaattagccaggtgtggtgctgcacacctgtaaccccagctacctggaggagacaggagaattgcttgaacccgggagatggaggttgcatgaggcgagattgcctcattgcactccagcctgggtgatagaatgagactctgtctcaaaataataataataataataaagttaaatataaataaataaaagcaaatgaatataatgagttttattcatttgttttgctgttgttattgttttggagacagagttttgttcttgtcgcccaggctggagtacaatgatgcgatctggtctcactgcaaccttcgcttcctgggttcaagcgattctcctgccttagtctcctgagtagctgggattagaggcgtgtgacaccacgcccgggtaatttttgtatttttagtagagatggggtttcaccatgttggccaggctggtctcgaactcctgacctcaggtgatccaccaacctgggcctcccaaagtgctgggattacaggtatgagctatcatgcctggccccatttcttttaaaatcagaaggaaaaaatatatataacttttaggccaaaaatgtcttcacgtatattaatagattgatcttttcccaatgcaaccataaatatcattttttaaaattattattattttagaaacagggtctcactctgacgcccaggctgaagtgcagtggtatgatcttagctcactgcagcctccaattcctgggctcaagcgatcctcccacatcagcttcttgaatgtgacctcaggcagacgtcaccgtgcccagctaatttttaatgtaattttatttttttggtaaagatgggttctcattatgttgcccaggccagtcttgaactcctggcctcaagtgatcctcctgccttggcctcctaaggtgctggtattataggattgagccaccaagcccggcccgaatataatttttaatttttttttttaagacagagtttcactcttgttgcctaggctggagtgcagtggcatgatctcggctgaccgcaacctccacctcccgggttcaagcgattctcctgcctcagcctcctgagtagctgggattacaggcatgcaccaccacacccaaataattttctatttttagtagggacggggtttctccacattggtcaggctggtcttgaactcccgacctcaggtgatcctcccatctcggcctcataaagtgctgggattacaggcatgtgccaccacgcccggcctaattttctaatttttttttttaactgaagaaggaccccaggaagtcaaaagtgcctataacccatgaaagtctaaatgaggacaacggaggctgggcatggtggctcactcctgtaatcccagcactttgggaggccaaggtgggcggatcacctgaggtcaggagtttgagaccagcctggccaacatagtgaaaccctgtctctactaaaaaacacaaaaattagtcgggtgtggtggcgggcacctatgatcacagctactcaggagggtgaggcaggagaatcgcttgaacctaggaggcggaggctgcagtgggctgagatcgcaccactgcactccagcctgggggacagagcgagaccccgtctcaaacaaacaaaacaaaacaaaatgaggacaatggggcttccaatggcaactcgagacgttagtttactccagagtcatggagacagtgaatggagtgtgtgtgtgtgtgtgtgtgtgtgtgtgtgcgtgtgcgtgagtgagagagagagagaggaagaagggagggagggagggttacaggagtgtgggaaagtcaacaggaaaaggagggaaggttcactgtgaactgacagtaactgtgacatcacaggcatgtgcggagtccccgcccccccaggcactgtgccaaggccagtaccttcatgtcatgagaccctctcagcaactctgtaaccttgtccccaccagaatattcctttcacagctgagaaaacaacagcacagagaggatgaattaaaaattgtctaacatgctgggcgcagtggctcacgcctgtaatcccagcactttgggatgatgaggcaggtggatcacaaggtcaagagatcaagaccatcctggctaacacggtgaaaacccgtctctactaaaaatacaaaaaagttagccaggcgtggtggcgggcgcctgtagtcccagctgctcgggaggctgaggcaggagttgctgggcactggacacaaggatttctatcagtgtgctctcctgcacatcacccaggtctggagtgccaggaggatcaaaaacatagaatcaaagattagccaccttccaactccaagtttcccccaccccatgccaccgttcctgccttgtacaagtgaagcaagcaatctctcctggtttcaccctaggaggtggaaggtccctggccctggctccatgtggcacgtgctctggtccttctccagcagcaggcttgtcagaccctcccagtccttcagctgagtccctgcacagtcccacaggttgtctactaagtaagcagcgtggtcgtggagctggggaaggaggtgcatggggatttagtgatggcatgttaaaataccctaggaagtggttactgattaaatatcgctctccttcctacagtgtacacccccatccttctccatctgtctttttttttttttttttttttggtagagacagggtctcactatgttgcccaagctggtctcaaactcctgggctcaaaggatcctcccacctcagcctcccaaagtgttgggcttacaggcgtgaaccaccaaccccagcccacttgtaggtcctatgcacaacagccagagttatctctgtgtatgtcaccttgctctccacaaagaaggacagcagaagctggaagaaagtcctctgggcacctgggctctggcgttgctctcttccacccatcgttcttatctcgcactcagggtagaaaagtctggtggaatggacacaaggaaagggctcagcacaggaggaaacaaggaggtgtaatgatgaccacagagggaggagatggcccaaggagatgataaaggaaaaggaggtgcagagctaaggaaagccccaaggagctgagagaggaaaagagacagcagagagacttccacggagatggggaggccttaagtagggcagcagcacatgtgggagagaaaccgagagggtggtgttaaagaaacgtaaaaggagccccactcacttccagtacagaaattcacccacagcagaggccaggcctcaattagaggcctacacaatggggtagacgctctcacagtccacgtccatcagcaccccttccatgttcctgcccacagaaaagcagaaagagtgtgtgaatagggacattgtcttctggcacaatcaaggctagaaagaaaaagaggcaaaagcaacaaggacataactcacaaaaaactcctaaatggagagtggaagacaagggagtatggggagttagagaagacagaaatattaccctctcaacatactgcaactcaggaatgacctcagtcaacctgcacagatggaagagtcagctgtgacaggtggagggagatgaccctggaagggcaaaggtctgagacactggcctcccctcttcccaggactcacttaaggataagtatcagtaatctgacggcctccactgccacactgtactctctgtccacgatcatggaaaccatccagtcctgcagaaaggagaaagtcactcaatatctcattacgcccattccaaatattctgttctcttagaatcagagcctcctaaagagagtgcctacgtagaggcagatgctgggatagccaagacatcttagagcatgaagggtagaaagatacaaggtggggaaacgggaaccacgacaaagagccaagccaaggagcaccacccgtctcaccttgaagcggccagtgaagagctccaggcgtgcggtcaggtcccggttaccgtacagccctttcagagccttcacgcacttcacgcggacttctcggtgctggtgaggagggaaaaccaagagaatggaaataagaccaaccacactctactcgcccctactgagcgtccagactcccctctccgatccctcattctagcttgggtgtcccctctactgaggactctaagatgtcagaaacaatgaacagctgtcttcatacttaaaaaaaaaaaaggatcacagcagtactcatgatgagaaggatcctttggctgccccttagcacctgcattaccatccatcaataactgtcttccattgtaaagtctctctccccgtacctcatgttttgagtcatttcatctcctgggtatgtctctctctaccttatcctaccctccccagtgctagcggagtttcaaggttcagcgccttgatgggttaatcattggtcactaggtaaaatatctcagtggcaggcccaggaaaaggtgaagtgtcctaggacaggaaaaagatgaaggaaacggaaagggaaactgactcgaatcccaccttatcatgcagagtccaaccaatatattttaaatagctgtcggtgaggaaagacgtgctgtagctttgcatccaacacccaatttcctcaatgcagatagcacggatctcaggaaggacatccctagacacagacagataagttgactcttagagccaccctctctccaaactcactttccatcctaccagttaactccctctcatggaagaatttattttcttgaaatgccatgtaccccatgcctttcatttcttcctcccgatgtaaatactatatatatagtaaaatacatgtaaatattttttctcttttttttaagggatggggtctcttgctgtgttgcccaagctggccttgaactcctgggttcaagtcatcttcccactttggcctctcaagtagctaggactacaaaaatgtgccatacccagttagtaaatattttctttctgttaccaaaccataaaatagttaaacaccagccttgtacagcctaattctccactccacctgttgcccaggctggagtgcagcggcacaatctcagctcactgcaacctctacctctcgggttcaagtgattctcctgcttcagcctcctgagtagctgggattacaggtgcaccaccacgcccagctacctttttgtatttttagtagagatggggtttcaccatgttggccaggctggtctcgaacttctgacctcaagtgatctgcccgtcttggcctcccaaagtgctggagttacaggtgtgagccactgcacccggcctccatacctcttttaaaaaccaattttgaaagttcattcaggctgggcatggtggccaaaaattagccaagcatggtggcgggtgcctgtagtcccagctacttggcaggctgaggcaggagaatcgcctgaacccgggaggcggaggtgcagtgagccaagatcgcgtcactgcactccagcctggtgacagagcaagactccgtttcaaataaaaaactaacacactgtacaactgcatgtaaggtggaaaagacaactggaattaaaatgtgctcaggtccttgtagaagataagaaatccagaggaaagcaagcaaagggggaaaaagaaacagaaaagataaaatgattgtgccaactcaatactaggccataaggctaagtctccataaatgtctttttttttttttttttttttttgagacagagtatcactctgtcacccaggctggagtgccgtggcacaatctcagctcactgcaacctccacctcctgggttcaagcaattctcatgcctcagcctcccaagtggctgggattacagacaaatgccaccacatgcagctaatttgtgtatttttagtagagatggggtttcgccatgttggccaggctggtctcgaactcctggcctcaagtgatctgcctgcctcagcctccccaagtgctgggatcacagatgtgagccactgtgcccagcccctacataaatttcaaacaccacattccctgactacaacacaataaagttagaaatcaaataacgaaaatataactagcaaaattctgtatgtttgaaaattttaaatattttcccagaaactataaaactacatgttaatgtggataaatctcaaacaatcttaactgaaataattaaatcacagaagcctgaataatggattcatttacataattaaagaacacattcatagtggtaacactataatgaaagatgagaaagattaacacaaagttcaccctagtgtttacctatgggtaataaggggactgtgaggtagggtagaaagaaggtacacaaaggatctctacagcactattaatgtttcatttcttgagctggggctagagatctgggtgatatctcatttttattttttaaactacatatacgctttgtacactttcagatattagaacttcaataaaattataaaaaaagaaacagagagggaaaaaataattaagtataattgtcaagatggagctaaaaaataacacgggtgaacaaggtgccacccacatctaagcttccttcccatgtcatgcaatgcctctcctcatctgctccatcaatcaataaaggcataatcactcctgtgatacctttaagaaaagaacacgctttaagaaaagaaacgctctctcgaagccgagtgcggtggctcacacctgtaatcccagcactttgggaggccgaggcaggcggatcacctgaggtcaggagttggagaccagcctggccgacatggcgaaaccccatctctactaaaaatacaaaaattagctaggcatggtggcacatgcctgtaagcccagctacttgggaggcctcagcctcccaagaccatgagaatcgcttgaacccaggaggcagaggctgcagtgagctgagactgtgccactgcactccagcctgggcaacagaaagagactgtctcaaaaaaaaaaaaaaaaaaaaagaacatgctctcttattcaaggttacccttctatcactccaaggattcaccccataatcttatctttcttgatatgttacactcactaaaatgttcacatcaaatcaagtttgtagacacttgtccttaccaccttacaaaaagtgagatggtatcaacagaggtaagacactgcttttacctgcatgtcacttttggcagctttcgcagcattgaaaagatcattggctggtggctctgactgtttccggctatgacgatgtaccgcttgggaccctttctttggatattttgccacctgatacacataaaaagatcagaaatatgaaaaaaaggtaatagtgacattaacacttggtttcatcattatcacacaagtaggcttacgctgccaattccacagcagtctgagttagactcagtcctgaaataattgatttttgtattatgaagtttattaacttttttccctttaaaaaaaaaattccttgagtctccttcccgtatctctataaccaaacatccttttcttttcttttctcttcgaaatttctcttcttcctatttccgtcccttaatactttgtaaatcttgtccttttttgaaccatatcacctgaacctcttaggttttctcttttttttgagacggagtctcgctctgtcgcccaggctggcgtgcagtggcgtgatctcggctcactgccagctctgcccccggggttcgtgccattctcctgcctcagcctcccgaatagctgggctgcttcccccacaagattcaaaaacaaaagaaaactggctgactcaccggcgttgttttcagtggtcgttttgctgctttcttcttcacaccgcgattgaagctgtcctcaaatcattttcttgtcttcttgtctatttgtatgaattactgagttacattctcattgctacttatttaagcaaagtattcttagtttgttaagaacaaagaactacaaattgtgttcattttctgtcctttcctgttcttagactaaattacctgaaatacatcaaaatatatgctgtatgcttacctatatcaaaactatgttgtttaggtgccgggcacagtggctcacacctgtaatccagcactttgggagttcaaggcgggcggatcgcctgaggtcaggagttcaagaccagcctggtcaacatggcaaaaccccgtctctactaaaaatacaaaaattagccaggtgcagtggacagtgcctgtaatctcagctactcatgaggctgaggcctgagaattgcttgaacccaggaggccaaggtggcagtgagctgagatcatgccactgcactccagcctgggtgacagagtgaaactccgtctgaaaaaaacaaaacaaacaaacaaacaaaaaaccagaccatattgtttagggatacttagctgacaaaataatagagacaagcatgacataattaccataaaaatcaggccctggggtgctggtggggaaggtttaagtggaaagaatggagcggtgacaatgtgtgtcaacctgggaggtggtgaccctggggttcgctttgtaattcctcaaaatgagcatttatgtgctattcacttttcagaggatagaattctgaactaaaatgtttaagcagccatacgcaaaaaaaaaagaaaaaatatggatagatttttattttaattaaaacatttaaaaaatagagacaaggcagctgggcgtggtggctcacgcctgtaatcccagcaatttgggaggccgaggcaggcgaatcacgaggtcaagagatcgagaccatcctggctaacacggtgaaaccaagtctctactaaaaatacaaaataaagttagccaggcgtggtggcgggcgcctgtagtcccagctactggggaggctgaggcaggagaatggcgtgaacccgggaggtggagcttgcagtgagtcgagatcaggccactgcattccagcctgggcgacagagcaagactccaactcaaaaaaaaaaaaaaaacatagagacaagggtcttgctatgttgctcagggtggtctcaaactctccgggctcaagcaatcctcccgcttcggtctcccaaagcgctgagattccaggcgtgaaccaccgcgctcgaccaggaaaaaaatatatatatatataatatacaatatattttataatatattatgtcatatattacacataatatacaatatgtataatacgcataataaaggtatatttaatatatataaagatatatatgtatataataatttttttttttgagacggagtttcactcttgctgcccaggctcgagtgcaatggctcgatctcagctcactgcaagctccgcctccagggttcaaaccattctcctgcctcagcctcccgagtagctgcgattacaggcgcccgacacacgcccggctaatttttgcatttttagtagacacggggtttcaccatgttggccagactggtctcgaactcctgatctcaggtgatccgcccgcctcggcctcccaaagtgccgggattacaggcgtgagccacggcgcccggcctgaataaatcttttaaaacataaaaatctgggtgagcccctggccggccggcacagatgccggggtggggccgcgaatcggttgggaagcactctatccggcctaggggcacccgggccagcacccggccgccgcgcgtgcgcagtgggcggggtgccccgcgctcctacctgcaagtggccagtgccaagtgctgggccgccgctcctgccgtgcatgttggggagccagtacatgcaggtgggctccacacggagaggggcgcagacccggtgatagggctttacctggtacatcggcatggcgcaaccaaagcaagagagggtggcgcgtgccagacaccaacggtcggaaaccgccagacaccaacggtcggaaaccgccagacaccaacgctcggaaaccgccagacaccaacgctcggaaaccgccagacaccaaggctcggaatacacgccagaccacgacggagggcgaccacctcccttctgaccctgct

SEQ ID NO: 1821 - DNA, 14417 bp, Homo sapiens
cccaccacacttggggaggcctccggatggatatgtccttccagctgatggacctcaggattgggagaaagatcggggacaagagacgggcacaacagtcacctggtttctttttcttcctttattttttgagactgagtctcgctttatcacctaggctagagtgcagtgacacgatcttggctcactgcaacctccacttcccaggttcaaatgattctcctgcctcagccttccgagtatctgggattacaggcgtgcactgccatacccgactaatttttggattttagtagagatggggttttgccatgttggccaggctggtcttgaactcctgacctcaagtgatctgcccaccttggcctcccaacgtgttgggattacaggtgtgagccaccgtgcccagccacatggtgtcttccatgacagctccctctctgctgaaatagcatttcccacccccacccatggcatcactcttctgctgccattttcatcaaagactgatgtcacttggcatgtttttaggtttttttctggtggcttttatttttttaattttagagatgaggtctcactatgttgcccagcctagtctcaaattcctaagctcaagggatccacctgcctctatctcccaaagtgctggggttacaggcatgcaccaccacgcctggaccacattgcatgcattttatttaaatttttttttttttttttttaagacggagtctcattctgtcacccaggctgaagtgtagtggtgcgatcttggctcactgcaatcccgggttcaagcaattctcctgcctcagcctcccgagtagctgggattacaggcgtgagccactgtgcccggcctttatttaagatttgcctccttaaccattacacctgtaatcccagccctttgggaggctgaggtgggcagatcacctgagttcaggtgttcaagaccagccaggccaagatggtgaaaccacatctctactaaaaattccaaaattagccaggcgtggtggcaggcacctgtagtcccagctaatcagaaggctgaggcaggggaattgcttgaacctgggaggtggaggttgcagtgagccaagattgcaccactgcactccagcctgggcagcagagtgagactgtctcacaaaaaaaaaaaaaaagaagtgtcaggtgctggcagagacactgcttttccctaattgacccgtttggtcctcacattaaccatattttacagctactctcatttacagataaggaaactgggccaatgaggaggtgagaaatcgctcaaggctgccaggtacagtggctcatccctgtaatcccagcactttgggaggccaagggaggaggattaattgaggccaggagtttgagaccagcctaggcaacataatgagactctgtctctacaaaaaatttaaaaattagtggggtgtggtgatgcatgtgtagtcccagctactccggaggctgaggtgggaggatcgcttgatcccaggtgtctgagacagtagtgagctacgactgcaccactgcactacaacctcggtgatgcaatgagatgctgtctcaaaaaaaaaacacacacacacacaaaacaacaaaaaaacaaattgttcaaggcgagcctggtgtgccaagcccttgttctgggcacttggcttatattatctcccttaatccttcccaccaccccaagtgctagatactgggattaatttagttgagctgtaatacatcaatactgtgtgaaatgctatgcaacatctaaaaggaagacaggtggagcttttatttattttttattttatttattttttgagacacagtctcgctgcattacccaacctggagtgcagtggcacaatcacagctcactgtagcctcaacctcctgggttcaaacaatcctcccacctcagcctctcaagtagctgggactacaggcttacaccaccaagcttggctaatttttttttttttttaagagatggtgttttgctaagttgcccacactgatctcaaaatccttttgtttttgctttggaatggtctggaactcctgagctcaagtgatcctcccaccttggcctcccaaaggcctgggattacacgtatgagccaccgcaccaagcccaggttgagcttttaaggtattaaagatccactaggtgaaaaaaaagagtgaaagatacatatgccatttaagggaagcacaggaaaactcctattttgtttatatgtgaatagaggcgcatagatgcctagaaaagtgtctgggagggaatgaaaccagattggccacaaaaatcacctctggaaaaaggaaaagaatggggactttcactttttgcttcatatgtttcatgcacctttttttttttttttttttgagatggagtttcactcttattgcccaggctggggtgcagtggtgcaatctcagctcactgcaacctctgcctcctaggttcaagcgattctcctgcctcagcctcccgagtagctgggattacaggcatgcgccaccacgcccggctaattttttgtgtttttagtagagacgaggtttctccatgttggtcaggctggtctcgaactcctgacatcaggtgatccgcccaccttggcctcccaaagtgctgggattacaggcgtgagccaccgcgcccagccgctttttctttttaaaaagtaaaatataacagagaaaactgcacaaaacagaagtgttcaaattaaattttttttttttgagacagggtcttgccctgttgcccaggctggagtgcagtggctcattcatagctcactgcagcctcaaactcctgggttcaagcgatcctcccaccccagcctcctgagtggctggaaggcgaagggaggatcgcttgagcccaggagtttgaggctgtgccaccacacgcagctgggtttttttttttttttttaattttttgtagagacagggtctcgctatgtcacccacgctggtctcaaactcacgggctcaagcaatcctcccatctttggcctcccaaagtactgagactacaaacatgagccatcttgcccagcccctagaacgtgttatcaaataaacaccgatgcaaccctcactcagccgagaagtaaaacattgccagccaatccctaaatgcttctgcttgccgcttcccaatcctaaccaatgccttctcctgacaattatgatggtcatgtctttgcatttctctaatgtttcccatcacgatcaaactagttttgttttgcctgtgtccaaactttgcataaatgagcagcatgtgtctggtggacctggcttcttccactcaacattatgataagaagattgaccatttggtgcccatagctattgctcttgcattttcattgctctatagattcttactcaacataccttaaaattttttttattctgaaataagagcgggatgctattaaaaaaagaaaaaagaagagaacaaaaaagtcctccagtaaatttaaaatatggtagtcaaggccgggcacggtggctcacacctgtaatcccagcactttgggaggctgaggtgggtggatcacccgaggtcaggagttcgagaccagcccggccaacatggcaaaaccctgtctctacgaaaaaaatacataaatcagccaggtgtggtggtgtgcacccgtaatcccagctacttgggaggctgagacatgagaattgcttgagcccgggaggcagaggtttcggtgagctgagaactgccactgcactccagcctgggtgacagaatgagactataaaagaaagaaagagagaaagagagagagaaaggaaggagagaagggaagggaggggaggagaggggaagggaggggaggggaggggagagaaggggaagggaagggaaggagaagggaaagggaagggaagaaaattagagattaattcaggagattcaacatccgcctaatagaaattctagaaagaggaagtagagaatagagaggccaggtgcagtggctcacacctataatctcagcactttgggaggctgaagtaggaggattgcttaaggccaggagtttgaggctgcagtgagctatgattgagccactgtactccagcctggaaaacaaagcaagacctcgtctctaaaagtaataatacgccgggacggtggctccccacactttgggagcctaaggtgggcggatcacttgaggtcaggctttcgagatcagcctggccaacatgatgaaacccaatctccactaaaaataaaaaaattagccaggtgtggtgctgcacacctgtaaccccagctacctggaggagacaggagaattgcttgaacccgggagatggaggttgcatgaggcgagattgcctcattgcactccagcctgggtgatagaatgagactctgtctcaaaataataataataataataaagttaaatataaataaataaaagcaaatgaatataatgagttttattcatttgttttgctgttgttattgttttggagacagagttttgttcttgtcgcccaggctggagtacaatgatgcgatctggtctcactgcaaccttcgcttcctgggttcaagcgattctcctgccttagtctcctgagtagctgggattagaggcgtgtgacaccacgcccgggtaatttttgtatttttagtagagatggggtttcaccatgttggccaggctggtctcgaactcctgacctcaggtgatccaccaacctgggcctcccaaagtgctgggattacaggtatgagctatcatgcctggccccatttcttttaaaatcagaaggaaaaaatatatataacttttaggccaaaaatgtcttcacgtatattaatagattgatcttttcccaatgcaaccataaatatcattttttaaaattattattattttagaaacagggtctcactctgacgcccaggctgaagtgcagtggtatgatcttagctcactgcagcctccaattcctgggctcaagcgatcctcccacatcagcttcttgaatgtgacctcaggcagacgtcaccgtgcccagctaatttttaatgtaattttatttttttggtaaagatgggttctcattatgttgcccaggccagtcttgaactcctggcctcaagtgatcctcctgccttggcctcctaaggtgctggtattataggattgagccaccaagcccggcccgaatataatttttaattttttttttaagacagagtttcactcttgttgcctaggctggagtgcagtggcatgatctcggctgaccgcaacctccacctcccgggttcaagcgattctcctgcctcagcctcctgagtagctgggattacaggcatgcaccaccacacccaaataattttctatttttagtagggacggggtttctccacattggtcaggctggtcttgaactcccgacctcaggtgatcctcccacctcggcctcataaagtgctgggattacaggcatgtgccaccacgcccggcctaattttctaatttttttttttaactgaagaaggaccccaggaagtcaaaagtgcctataacccatgaaagtctaaatgaggacaacggaggctgggcatggtggctcactcctgtaatcccagcactttgggaggccaaggtgggcggatcacctgaggtcaggagtttgagaccagcctggccaacatagtgaaaccctgtctctactaaaaaacacaaaaattagtcgggtgtggtggcgggcacctatgatcacagctactcaggagggtgaggcaggagaatcgcttgaacctaggaggcggaggctgcagtgggctgagatcgcaccactgcactccagcctgggggacagagcgagaccccgtctcaaacaaacaaaacaaaacaaaatgaggacaatggggcttccaatggcaactcgagacgttagtttactccagagtcatggagacagagaatggagtgtgtgtgtgtgtgtgtgtgtgtgtgtgtgtgcgtgtgcgtgagtgagagagagagagaggaagaagggagggagggagggttacaggagtgtgggaaagtcaacaggaaaaggagggaaggttcgctgtgaactgacagtaactgtgacatcacaggcatgtgcggagtccccgcccccccaggcactgtgccaaggccagtaccttcatgtcatgagaccctctcagcaactctgtaaccttgtccccaccagaatattcctttcacagctgagaaaacaacagcacagagaggatgaattaaaaattgtctaacatgctgggcgcagtggctcacgcctgtaatcccagcactttgggatgatgaggcaggtggatcacaaggtcaagagatcaagaccatcctggctaacacggtgaaaacccgtctctactaaaaatacaaaaaagttagccaggcgtggtggcgggcgcctgtagtcccagctgctcgggaggctgaggcaggagttgctgggcactggacacaaggatttctatcagtgtgctctcctgcacatcacccaggtctggagtgccaggaggatcaaaaacatagaatcaaagattagccaccttccaactccaagtttcccccaccccatgccaccgttcctgccttgtacaagtgaagcaagcaatctctcctggtttcaccctaggaggtggaaggtccctggccctggctccatgtggcacgtgctctggtccttctccagcagcaggcttgtcagaccctcccagtccttcagctgagtccctgcacagtcccacaggttgtctactaagtaagcagcgtggtcgtggagctggggaaggaggtgcatggggatttagtgatggcatgttaaaataccctaggaagtggttactgattaaatatcgctctccttcctacagtgtacacccccatccttctccatctgtcttttttttttttttttttttttggtagagacagggtctcactatgttgcccaagctggtctcaaactcctgggctcaaaggatcctcccacctcagcctcccaaagtgttgggcttacaggcgtgaaccaccaaccccagcccacttgtaggtcctatgcacaacagccagagttatctctgtgtatgtcaccttgctctccacaaagaaggacagcagaagctggaagaaagtcctctgggcacctgggctctggcgttgctctcttccacccatcgttcttatctcgcactcagggtagaaaagtctggtggaatggacacaaggaaagggctcagcacaggaggaaacaaggaggtgtaatgatgaccacagagggaggagatggcccaaggagatgataaaggaaaaggaggtgcagagctaaggaaagccccaaggagctgagagaggaaaagagacagcagagagacttccacggagatggggaggccttaagtagggcagcagcacatgtgggagagaaaccgagagggtggtgttaaagaaacgtaaaaggagccccactcacttccagtacagaaattcacccacagcagaggccaggcctcaattagaggcctacacaatggggtagacgctctcacagtccacgtccatcagcaccccttccatgttcctgcccacagaaaagcagaaagagtgtgtgaatagggacattgtcttctggcacaatcaaggctagaaagaaaaagaggcaaaagcaacaaggacataactcacaaaaaactcctaaatggagagtggaagacaagggagtatggggagttagagaagacagaaatattaccctctcaacatactgcaactcaggaatgacctcagtcaacctgcacagatggaagagtcagctgtgacaggtggagggagatgaccctggaagggcaaaggtctgagacactggcctcccctcttcccaggactcacttaaggataagtatcagtaatctgacggcctccactgccacactgtactctctgtccatgatcatggaaaccatccagtcctgcagaaaggagaaagtcactcaatatctcattacgcccattccaaatattctgttctcttagaatcagagcctcctaaagagagtgcctacgtagaggcagatgctgggatagccaagacatcttagagcatgaagggtagaaagatacaaggtggggaaacgggaaccacgacaaagagccaagccaaggagcaccacctgtctcaccttgaagcagccagtgaagagctccaggcgtgcggtcaggtcccggttaccgtacagccctttcagagccttcacgcacttcacgcggacttctcggtgctggtgaggagggaaaaccaagagaatggaaataagaccaaccacactctactcgcccctactgagcgtccagactcccctctccgatccctcattctagcttgggtgtcccctctactgaggactctaagatgtcagaaacaatgaacagctgtcttcatacttaaaaaaaaaaaaggatcacagcagtactcatgatgagaaggatcctttggctgccccttagcacctgcattaccatccatcaataactgtcttccattgtaaagtctctctccccgtacctcatgttttgagtcatttcatctcctgggtatgtctctctctaccttatcctaccctccccagtgctagcggagtttcaaggttcagcgccttgatgggttaatcattggtcactaggtaaaatatctcagtggcaggcccaggaaaaggtgaagtgtcctaggacaggaaaaagatgaaggaaacggaaagggaaactgactcgaatcccaccttatcatgcagagtccaaccaatatattttaaatagctgtcggtgaggaaagacgtgctgtagctttgcatccaacacccaatttcctcaatgcagatagcacggatctcaggaaggacatccctagacacagacagataagttgactcttagagccaccctctctccaaactcactttccatcctaccagttaactccctctcatggaagaatttattttcttgaaatgccatgtaccccatgcctttcatttcttcctcccgatgtaaatactatatatatagtaaaatacatgtaaatattttttctcttttttttaagggatggggtctcttgctgtgttgcccaagctggccttgaactcctgggttcaagtcatcttcccactttggcctctcaagtagctaggactacaaaaatgtgccatacccagttagtaaatattttctttctgttaccaaaccataaaatagttaaacaccagccttgtacagcctaattctccactccacctgttgcccaggctggagtgcagcggcacaatctcagctcactgcaacctctacctctcgggttcaagtgattctcctgcttcagcctcctgagtagctgggattacaggtgcaccaccacgcccagctacctttttgtatttttagtagagatggggtttcaccatgttggccaggctggtctcgaacttctgacctcaagtgatctgcccgtcttggcctcccaaagtgctggagttacaggtgtgagccactgcacccggcctccatacctcttttaaaaaccaattttgaaagttcattcaggctgggcatggtggccaaaaattagccaagcatggtggcgggtgcctgtagtcccagctacttggcaggctgaggcaggagaatcgcctgaacccgggaggcggaggtgcagtgagccaagatcgcgtcactgcactccagcctggtgacagagcaagactccgtttcaaataaaaaactaacacactgtacaactgcatgtaaggtggaaaagacaactggaattaaaatgtgctcaggtccttgtagaagataagaaatccagaggaaagcaagcaaagggggaaaaagaaacagaaaagataaaatgattgtaccaactcaatactaggccataaggctaagtctccataaatttttttttttttttttttttttttgagacagagtatcactctgtcacccaggctggagtgccgtggcacaatctcagctcactgcaacctccacctcctgggttcaagcaattctcatgcctcagcctcccaagtggctgggattacagacaaatgccaccacatgcagctaatttgtgtatttttagtagagatggggtttcgccatgttggccaggctggtctcgaactcctggcctcaagtgatctgcctgcctcagcctccccaagtgctgggatcacagatgtgagccactgtgcccagcccccacataaatttcaaacaccacattccctgactacaacacaataaagttagaaatcaaataacgaaaatataactagcaaaattctgtatgtttgaaaattttaaatattttcccagaaactataaaactacatgttaatgtggataaatctcaaacaatcttaactgaaataattaaatcacagaagcctgaataatggattcatttacataattaaagaacacattcatagtggtaacactataatgaaagatgagaaagattaacacaaagttcaccctagtgtttacctatgggtaataaggggactgtgaggtagggtagaaagaaggtacacaaaggatctctacagcactattaatgtttcatttcttgagctggggctagagatctgggtgatatctcatttttattttttaaactacatatacgctttgtacactttcagatattagaacttcaataaaattataaaaaaagaaacagggaaaaaataattaagtataattgtcaagatggagctaaaaaataacacgggtgaacaaggtgccacccacatctaagcttccttcccatgtcatgcaatgcctctcctcatctgctccatcaatcaataaaggcataatcactcctgtgatacctttaagaaaagaacacgctttaagaaaagaaacgctctctcgaagccgggtgcggtggctcacacctgtaatcccagcactttgggaggccgaggcaggcggatcacctgaggtcaggagttggagaccagcctggccgacatggcgaaaccccatctctactaaaaatacaaaaattagctaggcatggtggcacatgcctgtaagcccagctacttgggaggcctcagcctcccaagaccatgagaatcgcttgaacccaggaggcagaggctgcagtgagctgagactgtgccactgcactccagcctgggcaacagaaagagactgtctcaaaaaaaaaaaaaaaaaaaaaaagaacatgctctcttattcaaggttacccttctatcactccaaggattcaccccataatcttatctttcttgatatgttacactcactaaaatgttcacatcaaatcaagtttgtagacacttgtccttaccaccttacaaaaagtgagatggtatcaacagaggtaagacactgcttttacctgcatgtcacttttggcagctttcgcagcattgaaaagatcattggctggtggctctgactgtttccggctatgacgatgtaccgcttgggaccctttctttggatattttgccacctgatacacataaaaagatcagaaatatgaaaaaaaggtaacagtgacattaacacttggtttcatcattatcacacaagtaggcttacgctgccaattccacagcagtctgagttagactcagtcctgaaataattgatttttatattatgaagtttattaacttttttccctttaaaaaaaaaattccttgagtctccttcccgtatctctataaccaaacatccttttcttttcttttcgaaatttctcttcttcctatttccgtcccttaatactttgtaaatcttgtccttttttgaaccatatcacctgaacctcttaggttttctcttttttttgagacggagtctcgctctgtcgcccaggctggcgtgcagtggcgtgatctcggctcactgccagctctgcccccggggttcgtgccattctcctgcctcagcctcccgaatagctgggctgcttcccccacaagattcaaaaacaaaagaaaactggctgactcaccggcgttgttttcagtggtcgttttgctgctttcttcttcacaccgcgattgaagctgtcctcaaatcattttcttgtcttcttgtctatttgtatgaattactgagttacattctcattgctacttatttaagcaaagtattcttagtttgttaagaacaaagaactacaaattgtgttcattttctgtcctttcctgttcttagactaaattacctgaaatacatcaaaatatatgctgtatgcttacctatatcaaaactatgttgtttaggtgccgggcacagtggctcacacctgtaatccagcactttgggagttcaaggcgggcggatcgcctgaggtcaggagttcaagaccagcctggtcaacatggcaaaaccccgtctctactaaaaatacaaaaattagccaggtgcagtggacagtgcctgtaatctcagctactcatgaggctgaggcctgagaattgcttgaacccaggaggccaaggtggcagtgagctgagatcatgccactgcactccagcctgggtgacagagtgaaactccgtctgaaaaaaacaaaacaaacaaacaaacaaaaaaccagaccatattgtttagggatacttagctgacaaaataatagagacaagcatgacataattaccataaaaatcaggccctggggtgctggtggggaaggtttaagtggaaagaatggagcggtgacaatgtgtgtcaacctgggaggtggtgaccctggggttcgctttgtaattcctcaaaatgagcatttatgtgctattcacttttcagaggatagaattctgaactaaaatgtttaagcagccatacgcaaaaaaagaaaaaatatggatagatttttattttaattaaaacatttaaaaaatagagacaaggcagctgggcgtggtggctcacgcctgtaatcccagcaatttgggaggccgaggcaggcgaatcacgaggtcaagagatcgagaccatcctggctaacacggtgaaaccaagtctctactaaaaatacaaaataaagttagccaggcgtggtggcgggcgcctgtagtcccagctactggggaggctgaggcaggagaatggcgtgaacccgggaggtggagcttgcagtgagtcgagatcaggccactgcattccagcctgggcgacagagcaagactccaactcaaaaaaaaaaaaaaaacatagagacaagggtcttgctatgttgctcagggtggtctcaaactctccgggctcaagcaatcctcccgcttcggtctcccaaagcgctgagattccaggcgtgaaccaccgcgctcgaccaggaaaaaaatatatatatatataatatacaatatattttataatatattatgtcatatattacacataatatacaatatgtataatacgcataataaaggtatatttaatatatataaagatatatatgtatataataatttttttttttgagacggagtttcactcttgctgcccaggctcgagtgcaatggctcgatctcagctcactgcaagctccgcctccagggttcaaaccattctcctgcctcagcctcccgagtagctgcgattacaggcgcccgacacacgcccggctaatttttgcatttttagtagacacggggtttcaccatgttggccagactggtctcgaactcctgatctcaggtgatccgcccgcctcggcctcccaaagtgccgggattacaggcgtgagccacggcgcccggcctgaataaatcttttaaaacataaaaatctgggtgagcccctggccggccggcacagatgccggggtggggccgcgaatcggttgggacgcactctatccggcctaggggcacccgggccagcacccggccgccgcgcgtgcgcagtgggcggggtgccccgcgctcctacctgcaagtggccagtgccaagtgctgggccgccgctcctgccgtgcatgttggggagccagtacatgcaggtgggctccacacggagaggggcgcagacccggtgatagggctttacctggtacatcggcatggcgcaaccaaagcaagagagggtggcgcgtgccagacaccaacggtcggaaaccgccagacaccaacggtcggaaaccgccaagacaccaacgctcggaaaccgccagacaccaacgctcggaaaccgccagacaccaaggctcggaatacacgccagaccacgacggagggcgaccacctcccttctgaccctgct

SEQ ID NO: 1822 - DNA, 975 bp, Homo sapiens
gtcaggagttcaagaccagcctggcctagatggtgaaaccctgtctcgagtgaaaatacaaatattagctgggcatggtggcacacacctgtaatctcagctactcagaagtctgagacagaagaattgccaaaacccgggagggagaggttgcagtgagccgagatcgcgccactgcactctagcctgggcgacagagcaagactccgtctcgaaagaaagaaagagaaaggaaattccccagggaagtacctcggcttatttcatgaagaggtactgaaggaagcagaggcatgtggaggacttccccacctcgtgcagctatttgggccgtggcgtctgaaatttcttatttcagagtcacccctttgatgaccttggcagtggactgcagtcatctgtttaggcctctccatggcccgtgtcaatgccgatatttctgtctgttgcacatttgatttccttgttgttggcatttagaaggccccctgtttcccagatcacaccacgggcatggaccgcagagattgcatcttgtgagtctgtagaaacagtcaaggccttgtcctctcttaggtccagagctcaggtgaatgcagattttcccggccatctgtgctgaagtccctgtggggaggctcctggctggtttcctgtaggtagacagctacacatcctgcccttcattggcttcttttcatgaagctcctgctgtctacaaaacatgtctcccttttcttcttgaaccacatctctgttattgaaactctagaagtcagccaggcacagtggctatgcctgtaatcccagcactttgggaggccaaggtgggtggatcacctgaggtcaggagttcaagaccagcctggccaacatggcgaaaccctgtctctaatacaaatactaaaattagccaagcatggtggccactgcactccagcctgggtgacagagcaagactctgtctcaaataaa

SEQ ID NO: 1823 - DNA, 14426 bp, Homo sapiens
cccaccacacttggggaggcctccggatggatatgtccttccagctgatggacctcaggattgggagaaagatcggggacaagagacgggcacaacagtcacctggtttctttttcttcctttattttttgagactgagtctcgctgtatcacctaggctagagtgcagtgacacgatcttggctcactgcaacctccacttcccaggttcaaatgattctcctgcctcagccttctgagtatctgggattacaggcgtgcactgccatacccgactaatttttggattttagtagagatggggttttgccatgttggccaggctggtcttgaactcctgacctcaagtgatctgcccaccttggcctcccaacgtgttgggattacaggtgtgagccaccgtgcccagccacatggtgtcttccgtgacagctccctctctgctgaaatagcatttcccacccccacccatggcatcactcttctgctgccattttcatcaaagactgatgtcacttggcatgtttttaggtttttttctggtggcttttatttttttaattttagagatgaggtctcactatgttgcccagcctagtctcaaattcctaagctcaagggatccacctgcctctatctcccaaagtgctggggttacaggcatgcaccaccacgcctggaccacattgcatgcattttatttaaattttttttttttttttttaagacggagtctcattctgtcacccaggctgaagtgtagtggtgcgatcttggctcactgcaatcccgggttcaagcaattctcctacctcagcctcccgagtagctgggattacaggcgtgagccactgtgcccggcctttatttaagatttgcctccttaaccattacacctgtaatcccagccctttgggaggctgaggtgggcagatcacctgagttcaggtgttcaagaccagccaggccaagatggtgaaaccacatctctactaaaaattccaaaattagccaggcgtggtagcaggcacctgtagtcccagctaatcagaaggctgaggcaggggaattgcttgaacctgggaggtggaggttgcagtgagccaagattgcaccactgcactccagcctgggcagcagagtgagactgtctcacaaaaaaaaaaaaaagaagtgtcaggtgctggcagagacactgcttttccctaattgacctgtttggtcctcacattaaccatattttacagctactctcatttacagataaggaaactgggccaatgaggaggtgagaaatcgctcaaggctgccaggtacagtggctcatccctgtaatcccagcactttgggaggccaagggaggaggattaattgaggccaggagtttgagaccagcctaggcaacataatgagactctgtctctacaaaaaatttaaaaattagtggggtgtggtgatgcatgtgtagtcccagctactccggaggctgaggtgggaggatcgcttgatcccaggtgtctgagacagtagtgagctacgattgcaccactgcactacaacctcggtgatgcaatgagacgctgtctcaaaaaaaaaaaaccacacacacacaaaacaacaaaaaaacaaattgttcaaggcgagcctggtgtgccaagcccttgttctgggcacttggcttatattatctcccttaatccttcccaccaccccaagtgctagatactgggattaatttagttgagctgtaatacatcaatactgtgtgaaatgctatgcaacatctaaaaggaagacaggtggagcttttatttattttttattttatttattttttgagacgcagtctcgctgcattacccaacctggagtgcagtggcacaatcacagctcactgtagcctcaacctcctgggttcaaacaatcctcccacctcagcctctcaagtagctgggactacaggcttacaccaccaagcttggctaattttttttttttttttttttagagatggtgttttgctaagttgtccacactgatctcaaaatccttttgtttttgctttggaatggtctggaactcctgagctcaagtgatcctcccaccttggcctcccaaaggcctgggattacacgtatgagccaccgcaccaagcccaggttgagcttttaaggtattaaagatccactaggtgaaaaaaaagagtgaaagatacatatgccatttaagggaagcacaggaaaactcctattttgtttatatgtgaatagaggcacatagatgcctagaaaagtgtctgggagggaatgaaaccagattggccacaaaaatcacctctggaaaaaggaaaagaatggggactttcactttttgcttcatatgtttcatgtacctttttttttttttttttgagatggagtttcactcttattgcccaggctggggtgcagtggtgcgatctcagctcactgcaacctctgcctcctaggttcaagcgattctcctgcctcagcctcccaagtagctgggattacaggcatgcgccaccacgcccggctaattttttgtgtttttagtagagacgaggtttctccatgttggtcaggctggtctcgaactcctgacatcaggtgatctacccactttggcctcccaaagtgctgggattacaggcgtgagccaccgcgcccagctgctttttctttttaaaaagtaaaatataacagagaaaactgcacaaaacagaagtgttcaaattaaatttttttttttttgagacagggtcttgccctgttgcccaggctggagtgcagtggctcattcatagctcactgcagcctcaaactcctgggttcaagcgatcctcccaccccagcctcctgagtggctggaaggccaagggaggatcgcttgagcccaggagtttgaggctgtgccaccacacgcagctggtttttttttttttttttaattttttgtagagacagggtctcgctatgtcacccacgctggtctcaaactcacgggctcaagcaatcctcccatctttggcctcccaaagtactgagactacaaacatgagccatcttgcccagcccctagaacgtgttatcaaataaacaccgatgcaaccctcactcagctgagaagtaaaacattgccagccaatccctaaatgcttctgcttgccgcttcccaatcctaaccaatgccttctcctgacaattatgatggtcatgtctttgcatttctctaatgtttcccatcacgatcaaactagttttgttttgcctgtgtccaaactttgcataaatgagcagcatgtgtctggtggacctggcttcttccactcaacattatgataagaagattgaccatttggtgcccatagctattgctcttgcattttcattgctctatagattcttactcaacataccttaaaaatttttttattctgaaataagagcgggatgctattaaaaaaagaaaaaagaagagaacaaaaaagtcctccagtaaatttaaaatatggtagtcaaggccgggcacggtggctcacacctgtaatcccagcactttgggaggctgaggtgggtggatcacccgaggtcaggagttcgagaccagcccggccaacatggcaaaaccctgtctctacgaaaaaaatacataaatcagccaggtgtggtggtgtgcacccgtaatcccagctactcgggaggctgagacatgagaattgcttgagcccgggaggcagaggtttcggtgagctgagaactgccactgcactccagcctgggtgacagaatgagactataaaagaaagaaagagagaaagagagagagaaaggaaggagggaagggaagggaggggaggggaggggaagggaggggaggggaggggagagaaggggaagggaagggaaggagaagggaaagggaagggaagaaaattagagattaattcaggagattcaacatccgcctaatagaaattctagaaagaggaagtagagaatagagaggccaggtgcagtggctcacacctataatctcagcactttgggaggctgaagtaggaggattgcttaaggccaggagtttgaggctgcagtgagctatgattgagccactgtactccagcctggaaaacaaagcaagacctcgtctctaaaagtaataatacgccgggacagtggctccccacactttgggaggctaaggtgggcggatcacttgaggtcaggctttcgagaccagcctggccaacatgatgaaacccaatctccactaaaaataaaaaaattagccaggtgtggtgctgcacacctgtaaccccagctacctgggaggagacaggagaatcgcttgaacccgggagatggaggttgcatgaggtgagatcgcctcattgcactccagcctgggtgatagaatgagactctgtctcaaaataataataataataataaagttaaatataaataaataaaagcaaatgaatataatgagttttattcatttgttttgctgttgttattgttttggagacagagttttgttcttgtcgcccaggctggagtacaatgatgcgatctggtctcactgcaaccttcgcttcctgggttcaagcgattctcctgccttagtctcctgagtagctgggattagaggcgtgtgacaccacgcccgggtaatttttgtatttttagtagagacggggtttcaccatgttggccaggctggtctcgaactcctgacctcaggtgatccaccaacctgggcctcccaaagtgctgggattacaggtatgagctatcatgcctggcctcatttcttttaaaatcagaaggaaaaaatatatataacttttaggccaaaaatgtcttcacatatattaatagattgatcttttcccaatgcaaccataaatatcattttttaaaattattattattttagaaacagggtctcactctgacgcccaggctgaagtgcagtggtatgatcttagctcactgtagcctccaattcctgggctcaagcgatcctcccacatcagcttcttgaatgtgacctcaggcagacgtcaccgtgcccagctaatttttaatgtaattttatttttttggtaaagatgggttctcattatgttgcccaggccggtcttgaactcctggcctcaagtgatcctcctgccttggcctcctaaggtgctggtattataggattgagccaccaagcccggcccgaatataatttttaaatttttttttttaagacagagtttcactcttgttgcctaggctggagtgcagtggcacgatctcggctgaccgcaacctccacctcccgggttcaagcgattctcctgcctcagcctcctgagtagctgggattacaggcatgcaccaccacacccaaataattttctatttttagtagagacagggtttctccacattggtcaggctggtcttgaactcccgacctcaggtgatcctcccacctcggcctcataaagtgctgggattacaggcatatgccaccacgcccggcctaattttctaatttttttttttaactgaagaaggaccccaggaagtcaaaagtgcctataacccaggaaagtctaaatgaggacaacggaggctgggcgtggtggctcactcctgtaatcccagcactttgggaggccaaggtgggcggatcacctgaggtcaggagttcgagaccagcctggccaacatagtgaaaccctgtctctactaaaaaacacaaaaattagtcgggtgtggtggcgggcacctatgatcacagcttctcaggagggtgaggcaggagaatcgcttgaacctaggaggcagaggctgcagtgggctgagatcgcaccactgcactccagcctgggggacagagcgagaccccgtctcaaacaaacaaaacaaaacaaaatgaggacaatggggcttccaatggcaactcgagacgttagtttactccagagtcatggagacagtgaatggagtgtgtgtgtgtgtgtgtgcgtgtgcgtgagtgagagagagaggaagaagggagggagggacggttacaggagtgtgggaaagtcaacaggaaaaggagggaaggttcgctgtgaactgacagtaactgtgacatcacaggcatgtgcggagtccccgcccccccaggcactgtgccaaggccagtaccttcatgtcatgagaccctctcagcaactctgtaaccttgtccccaccagaatattcctttcacagctgagaaaacaacagcacagagaggatgaattaaaaattgtctaacatgctgggcgcagtggctcacgcctgtaatcccagcactttgggatgatgaggcaggtggatcacaaggtcaagagatcaagaccatcctggctaacacggtgaaaacccgtctctactaaaaatacaaaaaagttagccgggcgtggtggcgggcacctgtagtcccagctgctcgggaggctgaggcaggagttgctgggcactggacacaaggatttctatcagtgtgctctcctgcacatcacccaggtctggagtgccaggaggatcaaaaacatagaatcaaagattagccaccttccaactccaagtttcccccaccccatgccaccgttcctgccttgtacaagtgaagcaagcaatctctcctggtttcaccctaggaggtggaaggtccctggccctggctccatgtggcacgtgctctggtccttctccagcagcaggcttgtcagaccctcccagtccttcagctgagtccctgcacagtcccacaggttgtctactaagtaagcagcgtggtcgtggagctggggaaggaggtgcatggggatttagtgatggcatgttaaaataccctaggaagtggttactgattaaatatcgctctccttcctacagtgtacacccccatccttctccatttgtctttttttttttttttttttggtagagacagggtctcactatgttgcccaagctggtctcaaactcctgggctcaaaggatcctcccacctcagcctcccaaagtgctgggcttacaggcgtgagccaccaaccccagcccacttgtaggtcctatgcacaacagccagagttctctctgtgtatgtcaccttgctctccacaaagaaggacagcagaagctggaagaaagtcctctgggcgcctgggctctggcgttgctctcttccacccatcgttcttatctcgcactcagggtagaaaagtctggtggaatggacacaaggaaagggctcagcacaggaggaaacaaggaggtgtaatcatgaccacagacggaggagatggcccaaggagatgataaaggaaaaggaggtgcagagctaaggaaagccccaaggagctgagagaggaaaagagacagcagagagacttccacggagatggggaggccttaagtagggcagcagcacatgtgggagagaaaccgagagggtggtgttaaagaaacgtaaaaggagccccactcacttccagtacagaaattcacccacagcagaggccaggcctcaattagaggcctacacaatggggtagacgctctcacagtccacgtccatcagcaccccttccatgttcctgcccacagaaaagcagaaagagtgtgtgaatagggacattgtcttctggcacaatcaaggctagaaagaaaaagaggcaaaagcaacaaggacataactcacaaaaaactcctaagtggagagtggaagacaagggagtatggggagttagagaagacagaaatattaccctctcaacatactgcaactcaggaatgacctcagtcaacctgcacagatggaagagtcagctgtgacaggtggagggagatgaccctggaagggcaaaggtctgagacactggcctcccctcttcccaggactcacttaaggataagtatcagtaatctgacggcctccactgccacactgtactctctgtccacgatcatggaaaccatccagtcctgcagaaaggagaaagtcactcaatatctcattacgcccattccaaatattctgttctcttagaatcagagcctcctaaagagagtgcctacgtagaggcagatgctgggatagccaagacatcttagagcatgaagggtagaaagatacaaggtggggaaacgggaaccacgacaaagagccaagccaaggagcaccacccgtctcaccttgaagcggccagtgaaggcgtgcggtcaggtcccggttaccgtacagccctttcagagccttcacgcacttcacgcggacttctcggtgctggtgaggagggaaaaccaagagaatggaaataagaccaaccacactctactcgcccctactgagcgtccagactcccctctccgatccctcattctagcttgggtgtcccctctactgaggactctgagatgtcagaaacaatgaacagctgtcttcatacttaaaaaaaaaaaaggatcacagcagtactcatgatgagaaggatcctttggctgccccttagcacctgcattaccatccatcaataactctcttccattggaaagtctctctccccgtacctcatgttttgagtcatttcatctcctgggtatgtctctctctaccttatcctaccctccccagtgctagcggagtttcaaggttcagcgccttgatgggttaatcattggtcactaggtaaaatatctcagtggcaggcccaggaaaaggtgaagtgtcctaggacaggaaaaagatgaaggaaacggaaagggaaactgactcgaatcccaccttatcatgcagagtccaaccaatatattttaaatagctgtcggtgaggaaagacgtgctgtagctttgcatccaacacccaatttcctcaatgcagatagcacggatctcaggaaggacatccctagacacagacagataagtcgactcttagagccaccctctctccaaactcactttccatcctaccagttaactccctctcatggaagaatttattttcttgaaatgccatgtaccccatgcctttcatttcttcctcccgatgtaaatactatatatatagtaaaatacatgtaaatattttttctcttttttttaagggatggggtctcttgctgtgttgcccaagctggccttgaactcctgggttcaagtcatcttcccactttggcctctcaagtagctaggactacaaaaatgtgccatacccagttagtaaatattttctttctgttaccaaaccataaaatagttaaacaccagccttgtacagcctaattctccactccacctgttgcccaggctggagtgcagcggcacaatctcagctcactgcaacctctacctctcgggttcaagtgattctcctgcctcagcctcctgagtagctgggattacaggtgcaccaccacgcccagctacctttttgtatttttagtagagatggggtttcaccatgttggccaggctggtctcgaactcctgacctcaagtgatctgcccgtcttggcctcccaaagtgctggagttacaggtgtgagccactgcacccggcctccatacctcttttaaaaaccaattttgaaagttcattcaggctgggcatggtggccaaaaattagccaagcatggtggcgggtgcctgtagtcccagctacttggcaggctgaggcaggagaatcgcctgaacccgggaggcggaggtgcagtgagccaagatcgcgtcactgcactccagcctggtgacagagcaagactccgtttcaaataaaaaactaacacactgtactactgcatgtaaggtggaaaagacaactggaattaaaatgtgctcaggtccttgtagaagataagaaatccagaggaaagcaagcaaagggggaaaaagaaacagaaaagataaaacgattgtgccaactcaatactaggccataaggctaagtctccataaatgtcttttttttttttttttttttttttgagacagagtatcactctgtcacccaggctggagtgccgtggcacaatctcagctcactgcaacctccacctcctgggttcaagcaattctcatgcctcagcctcccaagtggctgggattacagacaaatgccaccacatgcagctaatttttgtatttttagtagagatggggtttcgccatgttggccaggctggtctcgaactcctggcctcaagtgatctgcctgcctcagcctccccaagtgctgggatcacagatgtgagccactgtgcctagcccctacataaatttcaaacaccacattccctgactacaacacaataaagttagaaatcaaataacgaaaatataactagcaaaattctgtatgtttgaaaattttaaatattttcccagaaactataaaactacatgttaatgtggataaatctcaaacaatcttaactgaaataattaaatcacagaagcctgaataatggattcatttacataattaaagaacacattcatagtggtaacactataatgaaagatgagaaagattaacgcaaagttcaccctagtgtttacctatgggtaataaggggactgtgaggtagggtagaaagaaggtacacaaaggatctctacagcactattaatgtttcatttcttgagctggggctagagatctgggtgatatctcatttttattttttaaactacatatacgctttgtacacttccagatattagaacttcaataaaattataaaaaaagaaacagagagggaaaaaataattaagtataattgtcaagatggagctaaaaaataacatgggtgaacaaggtgccacccacatctaagcttccttcccatgtcatgcaatgcctctcctcatctgctccatcaatcaataaaggcataatcactcctgtgatacctttaagaaaagaacacgctttaagaaaagaaacgctctctcgaagccgggtgcggtggctcacacctgtaatcccagcactttgggaggccgaggcaggcggatcacctgaggtcaggagttggagaccagcctggccgacatggtgaaaccccatctctactaaaaatacaaaaattagctaggcatggtggcacatgcctgtaagcccagctacttgggaggcctcagcctcccaagaccatgagaatcgcttgaacccaggaggcagaggctgcagtgagctgagactgtgccactgcactccagcctgggcaactgtctcaaaaaaaaaaaaaaaaaaaaaaaagaacatgctctcttattcaaggttaccttctatcactccaaggattcaccccataatcttatctttcttgatatgttacactcactaaaatgttcacatcaaatcaagtttgtagacacttgtccttaccaccttacaaaaagtgagatggtatcaacagaggtaagacactgcttttacctgcatgtcacttttggcagctttcgcagcattgaaaatatcattggctggtggctctgactgtttccggctatgacgatgtaccgcttgggaccctttctttggatattttgccacctgatacacataaaaagatcagaaatatgaaaaaaaggtaacagtgacattaacacttggtttcatcattatcacacaagtaggcttatgctgccaattccacagcagtctgagttagactcagtcctgaaataattgatttttatattatgaagtttattaacttttttccctttaaaaaaaaaattccttgagtctccttcccgtatctctataaccaaacatccttttcttttcttttctcttcgaaatttctcttcttcctatttccgtcccttaatactttgtaaatcttgtccttttttgaaccatatcacctgaacctcttaggttttctcttttttttgagacggagtctcgctctgtcgcccaggctggcgtgcagtggcgtgatctcggctcactgccagctctgcccccagggttcgtgccattctcctgcctcagcctcccgaataactgggctgattcccccacaagattcaaaaacaaaagaaaactggctgactcaccggcgttgttttcagtggtcgttttgctgctttcttcttcacaccgcgattgaagctgtcctcaaatcattttcttgtcttcttgtctatttgtatgaattactgagttacattctcattgctacttatttaagcaaagtattcttagtttgttaagaacaaagaactacaaattgtgttcattttctgtcctttcctgttcttagactaaattacctgaaatacatcaaaatatatgctgtatgcttacctatatcaaaactatgttgtttaggtgccgggcacggtggctcacacctgtaatccagcactttgggagttcaaggcgggcggatcgcctgaggtcaggagttcaagaccagcctggtcaacatggcaaaaccccgtctctactaaaaatacaaaaattagccaggtgcagtggacagtgcctgtaatctcagctactcatgaggctgaggcctgagaattgcttgaacccaggaggccaaggtggcagtgagctgagatcatgccactgcactccagcctgggtgacagagtgaaactccgtctgaaaaaaacaaaaaaaacaaacaaacaaaaaacctgaccatattgtttagggatacttagctgacaaaataatagagacaagcatgacataattaccacaaaaatcaggccctggggtgctggtggggaaggtttaagtggaaagaatggagcggtgacaatgtgtgtcaacctaggaggtggtgaccctggggttcgctttgtaattcctcaaaatgagcatttatgtgctattcacttttcagaggatagaattctgaactaaaatgtttaagcagccatacgcaaaaaaaaaaaaaaatatggatagatttttattttaattaaaacatttaaaaaatagagacaaggcagctgggcgtggtggctcacgcctgtaatcccagcaatttgggaggccgaggcaggcgaatcacgaggtcaagagatcgagaccatcctggctaacacggtgaaaccatgtctctactaaaaatacaaaataaagttagccaggcgtggtggcgggcgcctgtagtcccagctactggggaggctgaggcaggagaatggcgtgaacccgggaggtggagcttgcagtgagccgagatcaggccactgcattccagcctgggcgacagagcaagactccaactcaaaaaaaaaaaaaaaacatagagacaagggtcttgctatgttgctcagggtggtctcaaactctccgggctcaagcaatcctcccgcttcggtctcccaagcaatcctcccgcttcggtctcccaaagcgctgagattccaggcgtgaaccaccgcgctcgaccaggaaaaaaaatatatatatatataatatataatatattttataatatattatgtcatatattacacataatatacaatatgtataatacgcataataaaggtatatttaatatatataaagatatatatgtatataataatttttttttttgagacggagtttcactcttgctgcccaggctcgagtgcaatggctcgatctcagctcactgcaagctccgcctccagggttcaaaccattctcctgcctcagcctcccgagtagctgcgattacaggcgcccgacacacgcccggctaatttttgcatttttagtagacacggggtttcaccatgttggccagactggtctcgaactcctgatctcaggtgatccgcccgcctcggcctcccaaagtgccgggattacaggcgtgagccacggcgcccggcctgaataaatcttttaaaacataaaaatctgggtgagcccctggccggccggcacagatgccggggtggggccgcgaatcggttgggacgcactctatccggcctaggggcacccgggccagcacccggccgccgcgcgtgcgcagtgggcggggggccccgcgctcctacctgcaagtggccagtgccaagtgctgggccgccgctcctgccgtgcatgttggggagccagtacatgcaggtgggctccacacggagaggggcgcagaccccgtgatagggctttacctggtacatcggcatggcgcaaccaaagcaagagagggtggcgcgtgccagacaccaacggtcggaaaccgccagacaccaacggtcagaaaccgccagacaccaacgctcggaaaccgccagacaccaacgctcggaatacacgccagaccacgacggagggcgaccacctcccttctgaccctgctgcgggcgttcggaaaaaaaaacgcagtcc

SEQ ID NO: 1824 - DNA, 937 bp, Homo sapiens
cacttgtaatcccagcacttttggaagccgatgccgacagataaccagaggtgaggaggttgagatcagcctggccaacatggtgaaacctgtctgtttttctgtaaaaatacagaaacaatgagctgggcgtgggagtgcacttctgtaatcccagctacttgtggggctgaggcaggagaatcacttgaaccgggaaggtggaggttccagtgagccgagatcacgacactacactccagcctgggcgacagagtgagactccgactcaaaaaaaaaaaaaaaaaagtgccagacagccctggtttggtctgatatgttcagaaaaaagcaaaacagtcacctctcaccttttcttttcctgcaatgatgccgtttaatacaacaatggctgtaggtctgcggcagaaatatcattcaagtgaaacagaagggctttcctggctggacacagtggtcactcctgcaatcccaacactttggttggctaaggtgggaggatttcttgcggccaggagttcgaggctgcagtgagctgtgatccaccactgcattccaggctgggcatcagagtgagacctgtctctaaaaaaacccttcactccccaaataaagggattttcaaataccagcctttcagcatgaggatcacatggaggaacattaagacacagatgctgggacccagccctattgattgtaattaaaaaactgaggtgaggcctgatttagctccatcattggaatccattcagatttgaaattctctgagttggacagtgcaagagagatcctaaagaaagcaaagtcactgtggactgaaatgagctgacaaggttttctgagcgtggtgaaatatgatctgggcctcgtttgggagggctgtggccaggccttgagtccgtggctcagtgggaccttctgaaacagcctccaa

SEQ ID NO: 1825 - DNA, 300 bp, Homo sapiens
gacagagtttcgctcttgtcacccaggctgcagtgcagtggctccatctcggctcactgcaacctctgcctcccaggttcaagtgattctcctgcctcagcctcccgagtagctgagattacaggcacccaccaccactcccggctaatttttgtattttagggtttcgtcatgtttgccaggctgatcttgaacacctgacttcaaatgatccacctgcctctgcctgtcaaagtgctgggaatacaggcataagacactgcacctggcctgtttttgttttttagagacaaggtctct

SEQ ID NO: 1826 - DNA, 319 bp, Homo sapiens
agattcatccaaacactccctcttccttttgcagccaagggacctacgtggggggctgggatctaccccaggggctgagtaaagaaaccaggccaccgtgtaatgcttctgcaactgatcacgttagaccccgaccccaaaccccaaaccactctccatcctccccagcctctcagactgctggcttctccaagccacctttctgactttctcctctgctcaaccccatgtgccactccttcccctccccattcttccctctctctgtcctcagaacactgcgtcatatcgttccctggtccctggctctctgaggccc

SEQ ID NO: 1827 - DNA, 255 bp, Homo sapiens
ctcacgcctgtaatcccagcactttgggaggctgaggcgggcggatcacgaagtcaggagatcgagaccatcctggctaaaacggtggaaccctgtctctactaaaaatacaaaaaattagctgggcatggtggtgggcgcctgtagtcccagccactcaggaggctgaggcaggagaatggtgtgaacccgggaggcagagcttgcagtgagctaagatcgtgccactgcactccagcctgggcgacagggcga

SEQ ID NO: 1828 - DNA, 3038 bp, Homo sapiens
tcaggcgggagccacagcgcctggcccaaaaccaagctttcttatcccaagcaccgacctttatcaagtctacctaatcctctgttgtctccttaagtgtccctcatgagtgatcacttcagagtcctcccgcatggagagctcacccactggggcatatttttcccattggaaaagtgtggttattggaagtttcctctttagaaagaacaggattggaggtgctctctggggtgtcctcctaccaagcagcctgttgaaggcctcgtagtactcagggagcacgagcgacactcgccgtcgcttcgccttcatcttgaggccacacagcgtctccgccacccaggtctcctcaggctcaggggcgagctccttctctggctcatcatcagattcatccaaacattccctcttccttttccagccaagggacctacgtggggggctgggatctaccccaggggctgagtaaagaaaccaggccaccgtgtaatgcttctgcaactgatcacgttagaccccgaccccaaaccccaaaccactctccatcctccccagcctcgcagactgctggcttctccaagccacctttctgactttctcctctgctcaaccccatgtgccactccttcccctccccattcttccctctctctgtcctcagaacactgcctcatatccttccctggtccctggctctctgagtccctcttttttttttttttttttgtttcgagacagaatcttgctttgtcacccaggctggagtgtagtggtgcaatctcagctcactgcaacatgcatctcccggattccagttattctcctgcctcagcctctcaggtagctgggattacaggtgcctgccataatgcccagctccattttgtacttttaatagagacagggtttcaccatgttggccaggctggtctcaaactcctggcctcaagtgatccgcctgccttggcttcccaaagtgctgggattacaagtgtgagccactgcacccagcctgaatttctccattcttcccacacaccctccccaggttctccttcctgacctctgacccttcttttttttcttcttttttttttttttttttttttttttttttttttttgagatagcatctcactctgtcacccagactggagtgcagtagcacgatctcggctcactgcaacctcttcctcccaggctcaagtgattctcctgtcttagcctcccaagtagctgggattataggcacacaccactaccgcctggctaatttttgtacttttagtagagatggggtttcaccatgttggccaggctggtcttgaactcctgacctcaggtgatctgcccgcctcagcctcccaaagtgttggggttacaggggtgagccaccacgcctggcccccttccttcatcttagtcaatcctatgccacctcttcttcctccagtcccctcacctgatggtcccgacacttcatcatccaccacctcctggagggggtaccctgaggtgctctgctgggggctccgctcttcctggggctgcggttgatggctcatcatgatctttcccaaaatctgtcccatctcaccaaacctagtctctgttctgtccttggtcttcttctggacactgctgggatccagaagagtgtgttatcaattctcgaggctgggagaagtcaggagtggagaacagctctgagaagttactgttgtccaactgaactcccaggtgccgacagagtccggtccctccaatcaggaaggtcggaatctctgatgtcatcgctcatgccaacctggcaaccagtttgaaaaaaaacacatgtaactgccaggctgatctcttgtcctggagatcctgggtgaatggtatctcctgccactgtcccaacctcagaccactgtccaaaagcatcttcagggtctccgcatccctctgttccctgtcccagcagaggctgtgtcctctccactcaaagcttgaagcgtgttggggtctcctcttctctgtacatgcccgtttcagagtccagtctggtgggagagggatcaggatgggaaagaaaagtagggtaagcagaaacgatgaaaccttacaagagtgagattatcatgtacaagagatcccaggaacattgacttgatgaaaaagtcacatcagagcactcaatttggcagaggttttctgccgagtgtctactgacattcactgtccgagattctgtactgggggtacacgcgtcctctgccctaaggcatctttgagtccaagagatattttgaggactggaaatcataggaaactgcccatgagttcacacatatttccaatggtgtccccaatttcagggagtccacggatcacctaaagccagcccctccagtttggctaagaaactctatatatcaagttttgtatcatatgtattgctcttaactcagaaaattccaccatttatagcagtggtttatttatttataccattgaaggaaatggtttatttatgaatctatattatggatattctataagatactgggtgtacaaaaagactaagtcgaaaaatctcagctgtgcacagtggctcatgcttgtaatcccatctctttgggtggccaagggaggaagactgcctgaggccagcagttcaagaccagtataggcaacatagcaagagcccatctctaaaacaaaacaaaacaaaacaaaacaaaattagccaggtgtcgtggctggcacctgtgttccaacaacttgagagactgaggtggcaggaggattgcttgagcctaggagttaggggctgcagtgagctgtgatcgtgacaccgcactccagtctgggcaacacagcaagaccttgtgtcaaaaaaatttttttaattaaatataaaagagtttcatgacattcagagaccatccaaagaacctgtgggttccggccaggcacagtggctcacgcctgtaatcccagcgctttgggaggccatagcaggtggatcgcttgaggtcaggagtttaaga

SEQ ID NO: 1829 - DNA, 257 bp, Homo sapiens
gttattctcctgcctcagcctctcaggtagctgggattacaggtgcctgccataatgcccagctcaattttgtacttttagtagagacgggggtttcaccatgttggccaggctggtctcaaactcctggcctcacgtgatccgcctgccttggcttcccaaagtgctgggattacaggtgtgagccactgcacccagcctgaatttctccattcttcccacacaccctccccaggttctccttcctgacctctgac

SEQ ID NO: 1830 - DNA, 300 bp, Homo sapiens; identical to SEQ ID NO: 1825

SEQ ID NO: 1831 - DNA, 614 bp, Homo sapiens
tcaagaccagcctgggcagcctagcaagatcccatcccttaaaaaaaagtttttaggctgggcatggtcactcatgcctgtaatcctagcactttgggaggccaaggcaggcgggttgcctgagctgaggagtttgagaccagcctgggcaacatggtgaaatcctgtctctactaaaatacaaaaaattagccaggtgtggtgttgggcacctataatcccaggtactcaggaggctgaggcaggagaattgcttgaacccaggaggcagaggttgcagtgagccgagagcgcgccactccactccagcctggacaacagagcgagactccgtctcaaaaaaaaaatgtttttaattagccagctgtgatgatgcatgcccatgtcccagctacttgggaggctgaagcaggaggattgcttgagcctgggaggtcaaggctgcagtgagctatgattgcgcccctgcactccagcctgggcagcggagggagaccctgtctgaaaataaaaaaagaggtgggggcctatgaccccccctttaattttggcccaaccttagtaacaggatagtcattgagtagggcaaaagtgatgttatgatgtttttcagc

SEQ ID NO: 1832 - DNA, 300 bp, Homo sapiens
gacagagtttcgctcttgtcacccaggctgcagtgcagtggctccatctcggctcactgcaacctctgcctcccaggttcaagcgattctcctgcctcagcctcccgagtagctgagattacaggcacccaccaccactcccggctaatttttgtattttagggtttcgtcatgtttgccaggctggtcttgaacacctgacttcaaatgatccacccgcctctgcctctcaaagtgctgggaatacaggcataagacactgcacccggcctgtttttgttttttagagacaaggtctct

SEQ ID NO: 1833 - DNA, 10119 bp, Homo sapiens
gggcctccagggaaccctgatcctgccattcacttcaggtcgggggaacagagtgaagcccctgcctcaaaaataatcataaaaattgaggtcggggaaggttcataaagattgatgcacctggagttaccaatttgggtcaagggtccaatgaagctttggtttacatcttgtgcagctaaccatttgagcccagagcctgagacttcgtcataaggagggaggattatggattaggcttctggactcgtggttcgtgatgttgtcacgttagaaacagatctagcgcggttacaagtttagatctgaagtgacacaaaaggccccagctgtgatgaagtccaaagccacattctctgagggtgccctactccctgggaagacccacccaaagtcctggctatgaagcagatcactggggctgaccttgggtgtattaagttttggagtcagggtcaccaaagtgtgagtttcacagttgaacacgatggttcagaagcagggtatagaatgaaaggcaggagataaaattgcacttctcaattgctctgaactctagctagacttgacatgggacgtgaataaccttcctgtctagagagctgcctccttgaagtgtgacattgtctctctcacttccagaacaccggacccaggggagatgtggattttcagcaggaactttattccaatgctaatggcagacatcaggaaggaggagaggaaccatttgtgcagatcatctagaagaacctggaccattcttgacagagctgaatacagtgatcacgttgtcctccaaggagcaggggtggggtggggtacttctaggagtccttggagaaaagtaagaaaccaggagtgtttccagttccaccctttcctgcggcaccacctccctttttatattgctgaatgccaacctccctggggcggaacctggaggtcctgtttcttatggacttggttgccacagtccaggagcatttgaaggcacagtgcaggggctcagattggcacagaattctttgtgaaatatgagtgccacagactgtaacagatagcttcatgcacactatgcattttattggtttgtttggaaaatgttggccattgaattattaataggtttatttcaaatagtttggaaattgttgtacttttgaaaacatgctgttcctgtagagttttttgatgagagttatagttgttatatatacctaaagataattttcttttcatttttaagtgagaattctttttatcctaaatcttttattatctttaaatttttttctgtattattatatgtgctcctgaagcgagcactctttttatctatgatacttccataataatctcttctatttatagctattggtagttccccaccagaaaaaaacataattctggtgatagaaatttttatttgctgtttaggtttgtgactgacttgtgagaattcagttgtgatttttaacatgtctcagatatatatactaacacgtctaatatatactatctattttattggtttattttgaaaaacatgggtatagaattatttaaatattattttatttactgaaatatttattaaatatatttatttatttaaatattattattactttaaatattattttaaatattttggaaatactggtatttttgaatagatgctgtttctataaagctgtgtgatgggtattataactgttgtatacacatacatataattttgttttcctttttaagagaggattcttttcatcctaaatcttttacctttcaatctttgtatctattattacacgtgctgctgaagggagcatggtttttatctatgatacttagttaacatatatattacatttatagctatgtggtagttcccctaaattcttgtaaaaataaatttttatttgatatttagtgtatgtttgaaatgtgagaattcagatggaattttttatcttgttttggcatgtttgtatgttactttaaagaggatgtgtgttctaaaggaggacatgagctgtgtgttttcaagagaacagtgcagtgcatctcttggggaaacataataaagatgaacttttctcaccttcacagtgagtgtgatcatattgtggtctggattgattatttgctgtcaagtgacatttttccttaatggggttgtggttatttgaacatatttgttagctttggaagataatcctgtgctgttttttatgtagaaaaaaacatacggctgggtgcagtgctcacacctacaatcccagcagttttggaggtcatggcgggaggatcacttgaagcctatttttaatttttattttttaaagaaaaacaacagaagagaaggctgatcccaagctacagggtttttttgtttgtttgtttgtttgtttgttttggagacagtctcgctctgtctcccaggctggagtgcagtggcacaacctcggctccctgcaactttcacctccgcgttcaagcaaattctcctgcctcagcctcccaagtagctgggactacaggcatccgcctgtacgtctgactaacttttgtaaaaatagtagagacaaggtttcaccatgttggccaggctggtctcaaactcctgacctcaagtgatccacccgcctcagtctcccaaagtgctgggattataggcatgagctactgtgcccagaccccaagctagagttttaaagcaggaaatgagagaaagatattgagagaggaaaaccaggtggtaagaaaactctaaaggtggctgggcatggtggctcacgcctgtgatcccagcaggagttcgagaccaggcaggagaatcactagcagagaatatgtctccccaacccctctcaaaaaaaaaaaaaaaagtccaggcgcggtggctcaggactgtaatcccagcactttgggaggctgaggcgggtggatcatgaggtcaggagatcaagaccatcctggctaatacggtgaaaccccatctctgctaaaaatacaaaaaattagctgggcgcggtggcaggcgcctgtagtcccagctactccggaggctgaggcaggagaatggtgtgaacccaggaggcggagcctgcagtgagcagagatcgcgccactgcactccagcctgggtgaaagcgcgagactccatcacaaaagaaaaaaaaaaaaagaaagttcctgcaacagttcaagctgtgaaagacaggcactctgccatgcaattctttgtgatttttcttttttatttttggagtcggggtcttgtgctgtcacccagactggggtgcagtggtgcggtcatagctcactgtgggctcagactcaagctcaagcaatcttcttatcttgcctttctaattgctgggattataagcatgagccactgcacctggcctgtgtgacgtaattctgatgtcaactccctgatgttacatcaaatgccacaggttaaggccaccagcccccgctaggctgccctcgcttcagatgcagctgcaagcttgggtgtccacagaccgcatgtacttctcaccaactggctgcaaatttggaggttcccaccacgtcctcaggtttgataattcaccataacaacccacagaactctgaaaagcatgatactttctctttctttatttgagacagagtcttgctctgtcacccaggctggagtgcagtggccaccatgcttggctaattttagtatttgtattagagacagggtttcgccatgttggccaggctggtcttgaactcctgacctcaggtgatccacccaccttggcctcccaaagtgctgggattacaggcatagccactgtgcctggctgacttctagagtttcaataacagagatgtggttcaagaagaaaagggagacatgttttgtagacagcaggagcttcatgaaaagaagccaatgaagggcaggatgtgtagctgtctacctacaggaaaccagccaggagcctccccacagggacttcagcacagatggccgggaaaatctgcattcacctgagctctggacctaagagaggacaaggccttgactgtttctacagactcacaagatgcaatctctgcggtccatgcccgtggtgtgatctgggaaacagggggccttctaaatgccaacaacaaggaaatcaaatgtgcaacagacagaaatatcggcattgacacgggccatggagaggcctaaacagatgactgcagtccactgccaaggtcatcaaaggggtgactctgaaataagaaatttcagacgccacggcccaaatagctgcacgaggtggggaagtcctccacatgcctctgcttccttcagtacctcttcatgaaataagccgaggtacttccctggggaatttcctttctctttctttctttcgagacggagtcttgctctgtcgcccaggctagagtgcagtggcgcgatctcggctcactgcaacctctccctcccgggttttggcaattcttctgtctcagacttctgagtagctgagattacaggtgtgtgccaccatgcccagctaatatttgtattttcactcgagacagggtttcaccatctaggccaggctggtcttgaactcctgacctcatgatccacccatcttggcctcccaaagtcctgggattacaggcacgagccaccacacccagacttctttttttattttttgagatgaagtttcgctcttgttgcccaggctggagtgcaatggcgagatctcagctcactgccacctcctcctcctcccaggttcaagtgattatcctgcctcagcctcccgagtagctgggattacaggcacccaacaccaaaccccgctgactttttgtatttttagtagagatggaatgtcaccatgttggccaggatggtcttgaacccctgacctctaatgatctacccgaattggtctcccaaaatgctgggattacaggcgtgagccactgtgcccagcccctcccatacctcttttggccaaggcagtacaattcagagaatcttgccagggaagactggtaaatggacatcaacatgatgcctatggctcctggtggatttagatacctcctggtgcttactgatacctttaccagttacatgggggcttttccatgccagactgaaaatgctggagatcactgatcaaccttcaactatttactagcagaacactgaggggactctgcagtcaccaatatctcctattgcacttggataaacacctcccgggaaatagagatgaatagaaaggaaatacttaaacaagcagaatggctacattccttcaaccagaagggtccattagtctgttttcacactgctataaagaactactggaaactggggaatttatgaagaaaagaggtttaattgactcacagttttgcaggctgtacaggaagcatggctggggagccctcaagaaactgacaatcacggcagaaggcgaaggggaagcaggcacgtttctggccatggtggagcaggagagacagagagagtgaagcaggaggtgctgcatgcttctaaacaaccagatcccatgagcgctcactcactatcacgagaccagcaagggggacgtcagccgccatgagccaatcatctcccaccaggtccctccctcaacactgggaattgcaattggacatgagatttggttggggatacagagctgaaccatatcaagggtagttcaaccactgagattgattgattgactgagatggggtcctgctctgttacctaggctggagtgcagtggcacaatctcggctcactgcaacctccgcctcccaggttcaagcaattctcctgcctcagcctccctagtagctgggactacagcacacgccaccacacctggctaatttttgtattttcagtagagacggggtttcaccatgtttgcccggctggtcttgaactcctgacctcgtgatcaccctgcctcggctcttcttttgctggaattacaggcgtgagccaccgcacccggacaaccactgagatttagaaggcagtcgagtccactataccacacctcacctggtttcttcctctgttggggcccctcgtggccactgttctgttactttttggtcctatttatttaaatggatggtgagctgtttgtcctccaggatccaacacttccaccttcagcttgtattacaacaataccagcctttcaagctactccgggtgaccccagaactcatctgaactcagaagcccaagagtttcattcctctcactttaggggactaagtgcccctggtcagcatgaagtcgatacagaagcatgacctccatccctaatccctcaagaatgaggagtggaaggtgttggcaggagggtgggacgcggtttgtaaatctgtaactgcatcagaccaaatctagttcaactttttttttttttgatggagtttcactcttgtcacccaggctggagtgcaatggcacgatctcagctcactgcaacctccacgtcctaggttcaagcattctgctgcctcagcctctggggtagctgggattacaagggtgcgccaccacgcctggctaatatttatatttttagtagagacggggtttcaccattttggccaggctggtcttgaactcctcgacctcaggtgatccacctgccttggcctcccaaagtgctgggattacaggcgtgagtcaccgcacccgaatcagttcaacttttatgtaatgaagttgtcagttgttttccaattgccatcgacctgcaggttgaaggtcatgtaccctgtgcatgcccaggttaaccacgcgtgccaccgtggagtggaacctaagagctcagcctgaagagcccggaccgatttaagaaccagacacccccaggcaggagccaggatccaatcagattgagttttggtgtcaccccatggcaggatccagtcagatcacacctcccagcattactttattgcaagatccaatcaaatcacacctcattaccctatgcttataaaacctgacacagcccccagctgtgtaagggagatttgagtacttcctcctgtgttcttgctggctgacttacaaaaaagctttaaaaaaaaaagccaggcgtggtggctcacgcctgtaatcccagcactttgggaggctgaggtgggcagatcacttgaggtcaggggtgcaagaccagcctggccaacatggtgaaaccccatctctactaaaaatacaaaaattagctgggtgtggtgacacacacctataatcccagctacttgggaggctgaggtaggagaatcacttgaacccaggaggcggaggttgcagtgagccaagatcacaccactgcactccagcctgggcgacagagtgagaagactccgtctaaaaaaaaaagttaaaattagcaccaaacgctttacaagtaaaaaaagtttttagctgcatatgtttaagtaactttttagattataagaaatacgcatgcaaaatggaaaggcacaaagaagagagcaaaaagtgcatgagatctcacatccaaggataaccgctgagaacatggaagtgctgactcttcagtctttatactatacacatttaggcctgttttgtttttataaaactgtaatcatataatacagacagttttataatctgctttttaaacacaacaattatataacatttagctgtttcatttgcattcaaattcataagggttccagtaactcatttatcagaaaaccaagagaaatattctcataaaaatataagtacataaggtcaggcatggtggctcacgcctgtaatcccagcactttgagaggccgaggtgggcggatcacctgagggcaggaattcaagaccagcctggccagcctggacaacatggtggaaccccgtctccactgaaaatacaaaaattagccgggcgtggtggcgcgcgcctgtaatggtagctactcagaaggctgaagcaggagaatcgcttgaacttggcaggtggaggttgcagtgaactgagatcgcgccactgcactgcagccagggcgccaaagtgagactccatctcaaaaaaagataaaaataaaaaataaaaaaaatgtatatatatgtatatatatttttccagacagggtcttactctgtctcacagtctgaagtgtagtgacgcaatcatagctcactgcagtctcaagttcctgggctcaggtgatcctcccacttcagcctcccaagtagctggaactacaggtgcatgccaccatgcccagtcaattttttttttaatttttcatagagacagagtctcactatgtttcccagtcctaataaacattatgtgataaaaagaaaaaagtaaatcatcctgaagttaagtctttaatgagaaatgcaaataaagcatttctcaataaattatgggaagagaatcaactgaagaataaacatctttagtaaatcttttgctcatgtgcattaaccaatactcttgaaaaccaggattaatttactgtaccttcttaatattcctttgaaattccttatggcgcacaggtagcgtagaaaataactgcttcacgctgactgtggtccctctggggtgggggtagggggttttctggatgattttcccatcgtgatcaaaaacaccagttgagtcccaaccttcgccgatacgtggcaggtagaaatggtgacatcactgtgagagaataccaggcatggtgtgttcagtgagagatccatgatgttgggcactgactactcttttcttcacttgcttttctctcaaaattttcttaaaaagctgatgatccctctgagataaccgagatctaaacggttgaggagtcatcacaaaatctaaggtctggcatctaaaagacagtgagacagagagcactaaacatgctttgttttgataaaagctttgacttcatttttcaggttgaattgcaaaaccataaatgatctcaagatttattgattctcaaatagagatttgttttgttattactcttcaaacaaaattttttaaaagaatttttttaaagaattttttaaaatttttaaaattttttttaaagaatccaaaagatattataattaaaatgtatatgtagggcagggtacggtggctcgtgcctgtaattccagcactttgggaggccaaggagggcagatcacttgaggcctggagttccagaccagcctgggcaacatggcaaaaccccatctctactaaaaatataaaaattagccaggagtggtggtgcacgctatagtcccagctcttcaggaggctgagtcacgaaagtcacttgaacctgggaggcagagactgcagtgagctgagactgtgccactgcactccagcctgggtgacagagtgcgactctgtctaaaaaaaaaaaaaaaaaaaatatatatatatatatatgtatatatatgtatatatatatgtatatatatgtatatatgtatatatgtatatatgtatatatatgtatatatttatgtatatatgtatatatatgtatatatatatgtatatatgtatatatatgtatatatatgtatatatatgtgtgtgtgcatgtaattatttataaaatttagtatctgtgctgtaattaaatagtgctttggtgaaatgtttccctaaaaattgataatgaaaaccaatggtaactatcatttattatctatatgttatgttcaaattgagaagttactgttttaataagggtaaccaattttttaaacaatactatttgcttcatttcattcatttattgctcacatttcagaagtactaggacttagattgcgcagtgagacaaaacagaattcagaagctagaagctgagatattgagatagaaaattgtaaataataatgattccaattaattttcagagaggtttttctaaggggtcaagtgaatggataaaaatattttctcacctcagtgcacaaagtgagctcagagctttcccccgaaagccaaaagtttcaacccgagttaggtcggcaaactcttgaatcttagatgtgtgatgtttcagagc

SEQ ID NO: 1834 - DNA, 256 bp, Homo sapiens
gttattctcctgcctcagcctctcaggtagctgggattacaggtgcctgccataatgcccagctccattttgtacttttaatagagacagggtttcaccatgttggccaggctggtctcaaactcctggcctcaagtgatccgcctgccttggcttcccaaagtgctgggattacaagtgtgagccactgcacccagcctgaatttctccattcttcccacacaccctccccaggttctccttcctgacctctgac
